United States Patent Application Publication US 2022/0211063 A1 - sequence listing, part 52

SEQ ID NO: 153 - DNA, 4395481 bp, Penicillium roqueforti (residues 1-1,465,161 of 4,395,481)
  misc_feature (85051)..(85355): n is a, c, g, or t
  misc_feature (96931)..(97054): n is a, c, g, or t
  misc_feature (167476)..(168900): n is a, c, g, or t
  misc_feature (174646)..(174786): n is a, c, g, or t
  misc_feature (186876)..(192766): n is a, c, g, or t
  misc_feature (360737)..(360928): n is a, c, g, or t
  misc_feature (391873)..(392032): n is a, c, g, or t
  misc_feature (496632)..(496820): n is a, c, g, or t
  misc_feature (596164)..(596393): n is a, c, g, or t
  misc_feature (682707)..(683337): n is a, c, g, or t
  misc_feature (718997)..(719085): n is a, c, g, or t
  misc_feature (843383)..(843552): n is a, c, g, or t
  misc_feature (1092662)..(1092833): n is a, c, g, or t
  misc_feature (1157494)..(1162593): n is a, c, g, or t
  misc_feature (1192529)..(1192706): n is a, c, g, or t
  misc_feature (1228208)..(1228319): n is a, c, g, or t
  misc_feature (1338736)..(1338891): n is a, c, g, or t
  misc_feature (1570125)..(1570326): n is a, c, g, or t
  misc_feature (1572374)..(1573011): n is a, c, g, or t
  misc_feature (1778870)..(1779017): n is a, c, g, or t
  misc_feature (2068372)..(2068449): n is a, c, g, or t
  misc_feature (2226844)..(2227063): n is a, c, g, or t
  misc_feature (2309559)..(2309714): n is a, c, g, or t
  misc_feature (2399228)..(2399407): n is a, c, g, or t
  misc_feature (2468061)..(2468277): n is a, c, g, or t
  misc_feature (2498600)..(2498659): n is a, c, g, or t
  misc_feature (2576485)..(2576740): n is a, c, g, or t
  misc_feature (2701275)..(2701495): n is a, c, g, or t
  misc_feature (2766375)..(2766490): n is a, c, g, or t
  misc_feature (2901256)..(2901520): n is a, c, g, or t
  misc_feature (2994258)..(2994403): n is a, c, g, or t
  misc_feature (3046124)..(3046244): n is a, c, g, or t
  misc_feature (3064270)..(3064600): n is a, c, g, or t
  misc_feature (3131055)..(3131213): n is a, c, g, or t
  misc_feature (3154989)..(3155736): n is a, c, g, or t
  misc_feature (3156691)..(3157002): n is a, c, g, or t
  misc_feature (3186953)..(3187613): n is a, c, g, or t
  misc_feature (3198500)..(3198771): n is a, c, g, or t
  misc_feature (3203205)..(3205179): n is a, c, g, or t
  misc_feature (3205906)..(3206218): n is a, c, g, or t
  misc_feature (3207664)..(3207822): n is a, c, g, or t
  misc_feature (3257357)..(3260954): n is a, c, g, or t
  misc_feature (3261760)..(3386759): n is a, c, g, or t
  misc_feature (3388221)..(3394651): n is a, c, g, or t
  misc_feature (3513925)..(3514255): n is a, c, g, or t
  misc_feature (3520773)..(3521165): n is a, c, g, or t
  misc_feature (3528586)..(3531140): n is a, c, g, or t
  misc_feature (3533531)..(3533642): n is a, c, g, or t
  misc_feature (3544018)..(3544205): n is a, c, g, or t
  misc_feature (3640869)..(3641060): n is a, c, g, or t
  misc_feature (3768087)..(3769809): n is a, c, g, or t
  misc_feature (3862432)..(3862766): n is a, c, g, or t
  misc_feature (3867803)..(3868440): n is a, c, g, or t
  misc_feature (3874002)..(3874693): n is a, c, g, or t
  misc_feature (3907382)..(3907609): n is a, c, g, or t
  misc_feature (4023516)..(4023672): n is a, c, g, or t
  misc_feature (4214586)..(4214731): n is a, c, g, or t
  misc_feature (4215818)..(4216330): n is a, c, g, or t
  misc_feature (4384523)..(4386942): n is a, c, g, or t
  misc_feature (4389367)..(4392880): n is a, c, g, or t
  misc_feature (4395479)..(4395479): n is a, c, g, or t
tacagttctaccgtaatcctaagtccggtcaagctttttttgtcaatggtgacttgggtaaagataggttttggagagagttttgtgaaaagaaaaagtaagcttaatggacaaaagaatttcacgcagctgcttttgtcctgctttgatctattttatagttagcctgcagttctccagacatataacagaatgagggaattacatttaagatccttgtcaacgattgaaactacatatttcggaagcagactcgttttatacgttacagattgacagggagcattccattaagaggtcgaacatattggaacacgtatagacaggagccttcagtaaaccatcagaatcaagtgaacgccgtaaattggctactgatatacctctgtccaaatttcaatttcacgcaggggtaaagagcttcaacgttctttctgtcagtggtttcgatactaacaaagcgtagtgcttccagaagccttttgaaagggatttctactcatggtttacgcgcaatatatgatagagagcgtctgtcatatcttcaatcgtcagtgtgggtaaatgatgacggatcttggaagcacaaaccaggacgcgtcagttccttcgaacaagtattttggattccaaacaagacctctcgactcagagatcccttccatagatgcaaaatagcttcacacgcttgcaggtctaatccctcgaaggcagatctatagaagttctccaggcgagctgcgtcgcaacgtttgagattcgagtgtgtattttccaggtttggatggttccaagttacaaattgctcaattaatgagaaggcaggctcattagaaaagaactttttgcaatgggtggaaaacagcgggctcctagttgagagagaccctcgcgcagtattgtcgttcatagggagggggctggatcggaggagcacacaaccgttgcgcccattatgcctttgtctcctatacaatctcgtatatcagcaatcaagcatgggaataatatttacctctttccaagctctggggcacagcttgccttgacttgggccattccatccctaggaatgacttctgaatactgccaaatttgcttcctggccgtggaacccaattgtgcgattgacgagggtataataattgaagtcctggggcctgctttcttccacctgaggcaaggctggctgtgatttaccagagttggcctgcaagtactgaacagagaaattctcggccataccattttttgggtaataaacaccatttataacttcgtggattggccttaaggactctagacgtcaggcagtggtggattacctgtttcgaagggatgactgttgatactcccactgagcggatataaatggggactcggcaccggggtgctggaagtttgggaatgtacatgtggaggccagtggccattgttgtttgccatagtccaaagaatcgaagttgagatgtttcgggggcacactgcgaatgaagagggccggtcgtaccaggctggagatcaaggacgcagcgctctgggcgggagttatatacgttatgaagggtaatgaccttccatcattacgtaagagagcctttcacgcttcgccgtgttgggtggggaaacttgtgatgcatgccgtcgccctgactggctaacgagatctggggcacttcttgatttggaattctcatgagagatgagagtatttgggaataatccacaaaaaggccaggggcgctttacaacgatatttacacaaggggtgagtaggattagctactcagacacttcgctgcagcgaatatggagcatatgtagggcacgtccgtctcgatacaagcgcagtcaaaaaatgaaaattaccattttattgaaaggtattgtaatatttacatccgtgcgccgaggtatattactccattccaaaatcttaatatactaagagaaatcccccaagtagtttgtcctctcgattgtgcatacacctgtcctccccctctgcatttatcatagaaatggacggcaccaatatggtaagggcaattgtgttcgcttcttttcccatactaagattgattatacagattcccgaagccgacctcgagatatcagcccgaatatcattgacagctttgcaaatttggtggctgggtaccccagacctgaaagacgcaattaaacagcatcacaaactcgatcctgggattgcatcactagtgctggcctgtcaacgtctcaggaagaatggatacagaaagggacggatccctcttacccagaacagcattttaaatcgacatgtgcaagccatggtggatgacctcaccgaagacacgctcaaaatatttggccttctcacctgtcacttcaacgaagattttggagtgcctctcccccgtcagcttcttcgattcttcgataccccctggaagcttctcggctatcgaagctatcactcccactccaaaacctggaatatacaaagggagatccccatgcaagttgcttgccccttcgattgtgcatacacctgcccagtcctcaacctctgcacttatcatagaaaaggacggcatcgatatggtaagggcaagattgttcgcttcttttcccatactaagatttattatacactttccccaagccgacctcaagatatcagcccgaatattattaacagctttgcaaatttggtggctgggtaccccaggcctggaagacgcaatttaacggcaacgcaagctcgatcctgggattgtatcactagtattggccagtcaacgtctcaggaagagtggatacagaaagggacggatccctctaacccagaacagcattttaaatcgacatgtgcaagccatggtaaaagagcattgcggacaaacggttggtgggatatccagtagatgagcatgccgtacacttcgtcataatatgaaacatgggttgtcgaagctgctggctgtcagactcatcccatcgcaaaggaagaattacgtactgaagtagcctctcactagctcatcagcagcatcgcaatactttacttgcgttattcacgtttatgatattggccggtcaaggctttattcgtgctcaattcattagattttggttcatatgcatgaaacccatgcctgtgcaaccactaacttcgatttattttcgcgatatccaagccccaaggcccccaagcaccagaagactctctgagtggcatcaattgggtcaattttactttccctttattccctagtcataacaatccttgtgtgtataagaccatgtctgtgggtccaatccacgtcggtatgtaccttgaccagaacaatacctcaatcactaatttgcttcatagcttcaagttgctatattcagcccgaggaaggttgtgattttgatatgtggtttctgagttcaaggaaggattttattataactatttttgtacttctaggcagagctcgataataggtccagtcaatatatatttgtaaaacgaaatctttaactatgcggaacgattcattaagcttaaagaatattgatatgccattttttcattagtagaatgtttcctttgttaagaccatttcaacataaaagctcaaaatgcagtagacggagacttcggatagcctaacaatctaccattaccctccaatttgtgctgctctttcttttctacttctcattcgctctaattccaccatatctactatttttgtactgccgcttaatatgtatcccaatccaatacacagactaaaaggaaggaaagtcggattctggacggaaattcactggtggttcatacgcaatgtatagttgttcaggtcaggagcgcggtggaagatcttctggtagatctccgtgagcatacgggcatcggcgcggatggtaggtgatatatttccattttggacaaggaagccgattgtgcgtttgaggatacgctcgagatcatgttcagcgactagtttgctcaggcttgacatgtaggtcgcggagagaacaagcatgttgccaaattgcctatataacatgaaagatcattagtattgccctttagcgtccacatttctccagattagttgggtccgcatacgaatgggcagtgccaaagatattggttaccaccaaccgatgggtatctacacaatcaaaagccacagtactccgaattgcagaatcaatacagatcttacaggcatcctgtaaattttcaggcagcgcccggagttggacttcagcggcggtcgatccgttagcgagtgaggtggttggtgttttggccatgtttagagcataggtgccatgcagagcgtggtagaggaacggtcggtggataatatacagggcaccgtagtacgttgcccgcatgtgggcggcgtttatttcattggctggctcgtcggtttccttccactgcatactgtcgggcagggatctgcgccagagatccaggttttcgctcaaagctccttgggcggtatatgaccacagtgtttccccctgttttttgattttgtagaggtcggtcgggactcgattcaggattttgcgcaggtggatttgagcgtagtagaacatcatgatcatacttgggcttgtactgaagtgttctgggagactaattgtgaattgtcctttagggaggtgcatccgaccttctgaatgagagatgccactggctggaagatcaagccctgcaagtaagtcactctccaactctaggcatgcccagtatacggagctatggaggtccttcactgagccctggttgagactttcataccgctttggtcttgtcagcacctgacaagccctcgaggcttgtgaaatccaactatgactctgaaacggatgagctagctggccggcatatagtccagcaagcagccccgcctgaacgtgctccagctcgtttgcaccctgcaagtggctcaaaattcctgtagcatatctgtacagcgtaataccagggatgctttggttgttcatcgtattcgcatcttcattgcgcattgtgggcgagagtgcaccgttcgcataatctgtctcgatatgggcgggaagaggtgatgtggtgcgctggccgcggtagccgatcttcctgttcatgatagaccccgagaggggagtaggagcttcgcaaattgcacccagggccaggcatagcaatactatggaactgtgaatatttcgatccacgcgtggtcgtggcgagttgcagcaggtctccttatcctcgctgtgtataccaaggctgcgattgaagctcctccgtttcttcgacggtggctcatcgcgtgctggctgtacacagtcggtgacagagcctggagaggaattgaagtggcagtaagattgaataaacctattcaccttgttgtcgagttcattccgatcaaggaacgggtgaagcttatacatgttagagaggtagctcccaaagtaacgttgagctgcgacaccacccagcttcacgttaccaagcatatcaatatcgacgtctccgtcaaatcccactctgcacccatcaggtccgtggctacaaacgccgggatccaatggtaaggggctgttatccagagtgtccagcatctccccatgatcatacgtgctaagaagaccgcgctcctcttctaaccgtatcacataatcttcgtcgtatctgtccggtaacagctgctggatcgagggccacagcaacaaatttcgggccgcagtgtgctgaacgggggtcgaaagcgcatattcagcctcaagcttggagccgacgtgaattggattcacaaggccaagattctgaccataatttggaacagccacaccatgtcccctgaaattcaatagactcctctctgtgaggtgggttaatgtctcgtcttgtcctaggagagagacgatgttaccggaatgttcatgtgtaccctgaataggcttgtagggctggtttgggtttccttgcgcagacaacatttgattttgtagcgttcgaaattgggctgtaaagttgtcctccatcttcgtcaaatggtctagcaaagtttgagtagacctattttccttgcgtagcgactcctctttatacgagcatggcagattgctttctctgcagtagccacaatttggtcgtccctcatcacacttggcctttttagctcggcatctatcacaggcctatagctctcgatgtcagctatatctttctcagggcaaaccagccaactaacctgcgcggcccttgcagccttcgcggtcctacgctggtgcggtccataggcctggtattggccaatcaccgagccaaccatttgtggaatggatgccattatgtgcgaatgtagaacaaaaagatccggttcttgtcgggcttttggttgtatcaactttcagttaaaacggttagagaaattcaaaacaaacgagcttgctttacaaacgaacccgtctaaaatcgttcgtttgtgttcgatgtagtaagataatgtcgaataagaagtttggaactttcagctagtggttgaatctgaatgtgcaacactatcgcaggctaatatgctcgcccttgagtcaccgtagcgtattcttggactgcgtagagataactgatgagcaagctgatttccccccgtgtatttaagaaaaaggccgaaatagaaaaactaagagcaaaaactgactatcataatttacagagttgaataagtacgaatcgcacggaaataggtggctgagagcgagtgctcgtaacaccacactaaagtatccacctcatttccagacttctggttccgctccattcctccattagttcactgatcactcagctccttgattaaagtgctattcttgaccgcattaaatttccacctcaacattcaaaaccgcattcgcaatatgcacgaggtgcttttattcgatactaaatcacatttacttaatccaatggtggggtaaatataatgtcgtcctcataacccacacctaccctcatagctatctccatctctagggattaggtaaagggggattgaccgcatatccccagtcccgcaagaaatcgggcgcagcacagctgataatatgatcctcggacacttagtaccattttaaattaccactaatgcattcaaggatttaattgtcacattcctagcttttcatgatccggtgcggtctatagatcagtgaagagaggttctacccgggcgatgtgatagctgatggatgatacatgaagagcccaattcccaaccatttatcaatatagctttcaaaatccctcccacggattacttcggctcaaagcactcacgaacggctctcaaagtcattttaggtcggcagttgcaatgttccagagaaacatgccttgtcccggttggcaaaagccttgggtctttctgcgaagtgtgctgatcgatgctgggtcaggttggactaggccccttgggatacgtaatagcttggtttaatcacaacaaagttattggtggagacttttaatcatggtagcctgtagtggctttgggtctggatgttcatttctgggaaccccggccatgcaatgcgctaaaatgaaaatttcagacgtgtcaggcgactgacgccaattgattgggccataagctttgcttcagggactagatctgagcgttggtacaaaagacaagtgctagtctaactgcgatggtgctgcagtagcaccagtccggcaacactagtttctttaatactacgtgtgaccctgttataacataaatgagatttaaatacccaatgtcagttattttactccttcatcgttcttctgttgtttttgttcatggagggaattatgaccaccaaaaacccgttctcccaacaaccatcaatatctggtgacccgatggcaattagttcactcttgaatgatcaaacattatcctcgcaccagtatccacgacctagctcacacaagacgtcccagggccctggaagtgccatgtttcgggcagtcaagttgtcggcatcatccgtccaggaaaacggcacccataccaagagtctgaatttgcaagatcaagagcaggattcattttcagatcgacaagcccgttcttccaatcccatcaaatgtgggatcaccaagaacgaaactccgccccgccaccgcctgtctcagaaagtatacaataaagaagaaacgcatttcatttggttccaccgcgtcattctcagggataaatggccggatgttcttgagaaattcagccgtcaatttccaagccgaccacgccgtagctatggaggacttgaaggcaggctccgaagatttctccaggaagaaacgttgtcctcttcccaaaagaaaaatcagggctggaagtatgggggaaagggtgggcaagccatttcctatacgagtagcgagggtgttgttcatatatgcacgtacccgtggatgcaggaaactgccggtccccaatccaaagtccaaagtcattctcaaaagaattgccggtattagactatgtttgcttaaaacccaggatataccgttcaaaaattcaatagccattgacgtgttctatatacaaccatcttcagtcagcctaaaaaggaaaaggatatggtaattcatacaaggtagatttttcatcatctgacttactcataaacgtacaaaggtagcatatcataagtgatatacatttctgtcacctgctggctgatcataccaactctagacacccaagagcaatgtgtaagttatgtattgttcatccaatctaggttgagaagacgcaggtttattttcgtttctttgtccaatatccatctttgaaccgttcggccgcttgaatttcaaatactgaaggatacttctccatgtaatcctgcacaatgctcaacgattgcagaacttggatcttttcaagatactctgcgaattaaacagaggctgctctcatggcatttcgactctgacttagctcaaagaagcgactaggccatgaaacccgggtatctgatgaatcgagggagcagtgcacgttatggtgataggctgagcgatcggcaacaagagcttcggaagcaccgttagggaaaaagggaagtcgggtttccaggattgcaggatcgttcggtggtaagaatgaaaaaggtgtgacagaagattgttgacttctcgagaacaggccggaatccatgtattagcagaccggtacgtgactgaaactttatagttcttgagtcatcctggatttgtggaagggatttgtggaagtatcagtcaatttggcaattcaaacctctcgcccatgggtctagcaaaagagaccatgttggtatccatctcaggtcggattggctttgactcgacatgtctctcttgtggccgccgttggcgattccagcacattttaccccttcgacgacgcggggcttgacctgcagtgtgtcacacacaattccgttgtttttggagccagtttgaatacatttgacttccactcccatggatcttctggagagtattgtggtgaagtacatgagcttggataactcatacgacccaaaaagaacagatctcgggtgcccatgttgacacagaggaggctcccttcaatggatgcgtgagcttcgagtatactagtaaaagggctgcttcagtatatttctcaaccatgaaccgtgtatatgatggtggatgagaataaaaatgagggttggacattgccggtgagtggtttattcctccattattggagatttggggtggcacgtttttctcgctctcgggcattgtagtagtgagacctctgatcacatgtccttctacgcgagtatgtgagcgttcctattggacgataatagttggtccgagatggccgcaactgacctcaatgccttggtctgaaccttgacctattttgtgggctgcatgaagcaggtcttcgcagtggttgatcctcgttatcacgggcccacgcacgaattttagaggtaatgtcgtatttcctttcagatcgagcaggatggcacgcttatgaatggtaatactttcatcctgggacccacgacgcattattattgaatgtcaagagcacataaagtacgaagctatacctaggcattactaggggtaatatgtcataaggtcgtcagtcgatacattcccgctcacattctgatctctaatcatcgtcctcattcccttagtgataagttagaggaaaccggttcctcaagcacactcaactttcctctatccagtcttccctgactctactttccagaatgacatggctataaggcggacttatggatgcaaaatcccaagacaatccagattcaggtaacatctcggtagtggtgaacgggagtatccatgcgcatccggcgaaaactgctatggtatcatattctcgtgcttagttccttgttgccttttgctaatgaatccttaaggtacaccccatacccatccaggtcaatgccaagtcgatttcgccttccatcaaggagattcctaggggtcaggtacgtttggccacaaaattccactgagagaccttccatctccaaatgacctgttgctgacctttatttgtttacgcatgacccacagcccgcgcaggatgaagaaaccccatccagtcagcctctttccgattccaacgaactgagacacactcaggtacccataacgcgatttttggataagtgaaatagacattgacttgtaccaggcaccatcggctgtcgtgaaaagagcaacggtatcaaacacaagccccagacgacgtataccctcaaagactgcgaattcgatggagaatccatgttatccaacggaagtgcaagatctacgagtgaattacagttctaccgtaatcctaagtccggtcaagctttttttgtccacggtgacatggatatagatacgttttagagagagttttgtggaagagaaagtgtgcttaattaaaaaaagacagcaggttgcaataaaacatgggaactaagtgagggccgtaaaatggctactgatttaactctctccaaatttcaatctcacgcaggagtaaacgagtttcgacgttccttcggtcagtggcttcaatactagcaaagtgtagtgcccccagaagccgtttgaacggaagtttctctccgtggtttccacgcaatatataatagagaaagtctcccggatcgtcaatggtcaatggtgatggggcttggatgcagaaaccagaacatggcggtttctgtaaataagtattttggattccacccaagatacttagatccagaactcccatccatgcagccaaaatagcttcacacgcgaccaggttcaatcctcggaaggcagatctatagaaatcctccaggcgagctgggtcgcaacgtttgagattcgacagtgttttttccaggactgtattattttgagccacaaattgatcaatcaatgagaagtcaggctcattaggaaagacctttttgcaatgggtagaaaacagcgggctcccctggaataccgtctgcatcctgccaaatgctgccctctggccgtaaaacccaatggtgcgattgacttgggcatattcatattcctgaaaacttattgcttcgtcttgggaatatagaacgaaattcccttccgcctggagcgaggccggctgtgatttattgcagctggcctgtgggtactgaacagggaggtactgaacagggaatctctcggtcatgctctcttatttttactaattagcaccatttataacctcatggattgactttcaagaatatggatacaggcagtggtggattggtggattacctgtttcgaatggaggtttgatgatactcgcactgggtggatctgaccggggactcggttcaagggcaatggtgaaaggtgggaaatgctgatttggaggccagtggccattgttgtttgccatgattctaaagaatcgaagttgagatgtttcggaggcagattgtgaacgaagagagtcgctcgtactaggtcaaagatcaaggacgcagcgcggatgggcggggggttatatacgttgtgaaggagaatgaccctccttccttgattatgagagcctttcacgcttcgccgtgttgggtggggaaactttttatgcataccgtcgctctgactggctggctggttctggggcgcttattgatttatgatccttatgagagtattggggagaatccacaaaaaggccaggagcgctattacgaggaaatatacccaaggggtgagtaggattggctgctaggacttcgctgcggcgagtatggagcaatcgtgaactactaacgagggcacgtctgtctcgatacaagcgcagtcaaaaaatgaaaattaccattttattgaaaggtattgtaatatttacatccgtgcgccgaggtatattactccattccaaaatcttaatatactaagagaaatcccccaagtagtttgtcctctcgattgtgcatacacctgtcctccccctctgcatttatcatagaaatggacggcaccaatatggtaagggcaattgtgttcgcttcttttcccatactaagattgattatacagattcccgaagccgacctcgagatatcagcccgaatatcattgacagctttgcaaatttggtggctgggtaccccagacctgaaagacgcaattaaacagcatcacaaactcgatcctgggattgcatcactagtgctggcctgtcaacgtctcaggaagaatggatacagaaagggacggatccctcttacccagaacagcattttaaatcgacatgtgcaagccatggtggatgacctcaccgaagacacgctcaaaatatttggccttctcacctgtcacttcaacgaagattttggagtgcctctcccccgtcagcttcttcgattcttcgataccccctggaagcttctcggctatgtttgcattggctccaccccagatacacgacaatggtcaaatcggagtcaatcaaaagctttaagagaaagtttatcaacctactagggcttgtggaatattatgtggttagggggaaatgggttctgtgtatctaaaccgtcggattgtgctctcatcgttggaacaatccatcaggagctagctactctactcaacggatagcttttgctaccagattgaatgaaccaaccagaatgctgctctgcgtttgccgcaccacaaatcacacttttacctcaataatggcattctccattctgcttctccattacttgacgtcgtctgatccaaattttgacacatgtgttgaaatcactgttgatgcgtaaactgggcctgcttcatactacctctggtcatgaacgttccacaaaaaagtcatatttcttttcttgcatgcctggatgcacggaattcatatcctgacacagaaataaatgactgaatcaagcaagtacacccgggcggtccaagtttgctgcctaggctgtctccaaaagcttaaagcatgcagatgacaaaagtatcatgcctctatacaaaagcctcgttaatgctgtgggcacgctcaaacccatgtgtcaatccttaaatttcctgtcaatcgagtaaaattccttgagaattaggcaattataaagggcgaaatatcgagcacaaatcttcaagtgaacttatccgagagaccctcggccggaaatcagaaaaagagaactcaatcctccacgctctaataactagatcagagtcgacgacaggctgaaacacctccagcatggctttttcggcgaggacagacccctccgtgtccccggttattgcggtatagccgcgcatgtgatagaatatatcacaacgaataagcacttctcgtttgaccgccagagtaatctgaatgagacgacccatatcagttgccttgggccactcatcttgaagatgatcatacaacaattgccgaaaaagctgacccaattcaccgttcattgcatagtaggtcgaattttccatcatgaccaggtaaatgtaggcaggtgagagtgcgtcggtttgaagttgaccatatctctctctgcatgctgccaggatactgaggcaaggcgtcatagaatgccctcttgggtcgttcaagactatggcttcaggcctgtcagtatcgatgttgaccggatgataagtctacttactatgagagaaaggttgaaagggaagtcggaagtccatcgtaggtggctgaaatggtagcaatgaaaggaagggcccgaactgtgcgagggacttgaagaaccgaagtttggggaacgtactggcataaataagatatcctttctaagcaacacccactctcgggcacttcaagaattcccatgtgcagggaccctgcaccctggtacacgaagtcattgtttggtagttcattatataggttttcattacctcaccgtacgccgcatttgaggggtagcctcaaaatggcgccaaacccatgcaatggataaaattatccctataagtgagatcagcatgcagccattgttagttctcagacactcagtcagttatccaatgaaaggtgcatgtaatcggactccacaatggcactgctaatccgctgcaggcgaacgcagataacacggtatgaaaggccagaggcgttcccgctgcgcaatggcgctaagtctacgccacttttcagtaagacagaaatcccgagtttttgaaaggcttttgtatttgtattaggggaagtgggccgaaatactggtttttataggccaggacggcctcgaagatactgcttttagaagatccatatcacgtccgggaaatactctctccttgttcgtccggattttggatcaaacgtcccgggagcatctcgagcataacataaatactcgaccggtccaccttcccggaaccatgcttcaatatttcaacagaatccattctggatacctgctaccatgtcgttggatgaggacttctgtgtaagacaatcaactctgggtttctctgcagtcatatgctaatttatgaagtttcctttcccaagagccagtctccaagccgccgaaacgactttaattgctcaacaagtgtggcttctgggcacaagagaggtcaaacgagcaataaagcggcagcacaaacccaatgctagaactgcatccctagtattcacctgccaggccctcagaaaatatcgctacttgctcttgggaaaacgcagagccttggccaagaacaatatactgaggaactatgcgcaccgtatggcaagcaagctcactgcacgtgatttggctatgctttcccttctcgcctggcattttgattcgaaaatggtgcctctcccccggaggcttcttatattcttcgccgacccctacaagcaatttgacacagtgtgccgatctatttaccgcagctacacgaaaatgtatgtaccggatacgttggcaaacttcgagggaagcttgaggaaattgttagggttattagaacgggacgtgatcagaggcgacgcggtcttgtttacctagatttgaccctctgttgagaccttgccatatcatactagtcaatgagaaataaaaaatacagcagatatacgctgagcttcaatgaaatcacctgcctcaacaccaacttcaatcactgaatgttataccacacttcccactactttcctttactattctgatctatacctatcaaagtttgttgtgggatttgcgagccaaaattgaggttggactttttctgccgttgcctattgtgctgttagtttgtcatccgtcgacgagtttcctctgcaacataattatctcactcaatgggatctatatcttaatcacggccaacagcattgcatcggttacttctctttctgggactgtttcatcatcagcctcaatacatggggcttgtgttgcgtgaaaagactcacgacaattgtcaagtacaaactcaacagagaaacatttgtggtaagagcggcgtcctgagcgtcctggatcatcttccaagggaagatctccttcatttatcgggaatccaatggcaacccggtagcattgaaggaattcgggaaaatctttcttcgtgatcagaccaagacctctgtggatatcgtccccatcattcccttcacctccttctccttcctttcgacaatgacggtagcacgcagttgaatctggaaagagttgaaagcatcgcggacaaataaatttcaagcctgtttttaccagagctcgaagcaagattgcgagccacctttccacgtcagacatcttgaagcaaagtgatagaagcaaccaggaaacagaaggctgacaatttgacaaaagtctactctttataggcgagggccggctcgccagcgcatcttcacagatccaagcacattagtaaatgcacttgccgaatagaactagcagttgggatgcgagatagcactcctgcaaaattttgattaagatattgatacgaaaacgtttggagtgacacagcctcgactgattgtggcctttggtttaattttgttacagcataggtactagtttacagctgctcttacagcctcgcatatcaaatgtccaagtattttactggccatataattcaagttagcttcatgatgacactatctaggacatgaagctgagcggatccagggcagtctaaaagtgtggtcttcaagcaagagcttggatttggaaggctcggttgcaggccgtgttccactaggagatcccatccaatggaagatctgatcatctccgtccgtgaaacccggtagtgttcgaaccacaatttgttaagaacataaggtgattcgccaatcttctcctcactcctcccttcgtgttgaacgatgtaatacgtctccagatcttcgccgtcttctggtatgacttcgtcgagtatgcgcaacggacgagacttcgagtccaaaatttcggcagaaatagattcattggaagggccaagattcatcctcggaggctgatagctcccttctgtatcaatcgttaatggattgcccgttcgatttattaaaggagtatacaaaccttgagagttttcccgtgactgtttccttatcaccccgcagcatcgaaagagcccgaagataccaaaccaaagggtatttagtatatccatatttcgcacaagactttaggtattaagacaataaaagatataaaacttcgtagggaggctttaaaaacagtgaggtactcaattgaaggatccgcgacgtcgagaccgtatagatatgcaagattatatacccctgaatggcaccaatgtcttgtatgttaccccgacccgtcatcattggcaagagtctccagcttcggggctcctgttgtttcctgcatgaggcctatcagagtcccgtaccttggcgccatcttcgtcactgtcagtattgtccagatttagggccggccgaccggcttgcttgtgatatgggactgggacggtaagaaaactgcttttgtgacaggggtcacgcaaagtttgggatagatttattggaagagtgccaggaaagcgtctggaaagcgtccggaaagtgtcagtacagcgtcaagggagtgtcagggggtcatcaggagggcatcaggaaagtgccaggaaaacgtctggaaagcgtccggaaagtgtcagtacagcgtcaagggagtgtcagggggtcatcaggagggcatcaggaaagtgccaggaaaacgtctggaaagcgtccggaaagtgtcagtacagcgtcaagggagtgtcagggggtcatcaggagggcatcaggaaagtgccaggaaaacgtctggaaagcgtccggaaagtgtcagtacagcgtcaagggagtgtcagggggtcatcaggagggcatcaggaaagtgccaggaaaacgtctggaaagcgtccggaaagtgtcagtacagcgtcaagggagtgtcagggggtcatcaggagggcatcaggaaagtgggagagtgtcagaaaaagcaaagttttgtgttcaactgttgtaatcgggcttggcgtattttctacgttggggccatttctggacgccacattcgggtttaccgccatatagtcaaatcacggccttgctctctggagacaccggtgctcttgtcgcattagagcatgctatttcgcatgtattagttcacaggctttctctagtaatcgcgaacaagtggtacttttgttttccccgcggggctgatcaaagccctagactaattatacttgtccgcagccttgggtgctctgataacagtacttccgactgaattatgttaggccaacttatagtcaaagcggactgtgcacgttgggcaaaacatataagacgaacatggtggaaggatcagggtatgagaaaatcgcaaacaatcatcctcccagttgtactcaataccataacgtgtctcctcagccgaacattttttgattatcgggaaggttgggcccctttctattgactttaatgtccaataataacggctctacatgctgcagatgtgcaagtggaatgaattgttgttccgatgcgggcatctcgatcgatatgctttggtcgaaagacataccccgaacgcgacctgtcaaccatctaccgaaaacccgcggcaggagatcaccccaaccataggggatagcctctgccctgcgtgtaattatccatctccagctagtaccatgtccccttaggtgagtgatactgcaggttcttccctattgcttccccgatcacgagcttacaatgtgagtgtctcagttgcgattattggtaccctcagatctgtaccgaagtccgccgttgccgctgaaaattcaattgaaggttgatggggaaccgacggtgcgcaacactggcactatcagaactttgggaagctccatcaaacaagctttcacgaggagacaaggcatgtcggttatgttcacttatctactcattttcagtgggagcattatatgcgaccggatgtgtactggctttgcaatcgcacaggggggttatcgccgctccacgctcattcaataaacgtctttttgtatatttagtctactactgtagatttagtgtagtgcaatttctcaattgccaaacaaggatgttgcaaaagttgcgaattgatacatcatacggtcgtacggcagtgtaagaatttttctaagctcaatgcataaattgttgccttaaagcaacagacaacatgactaagcttcaccgcttgctttggtccgtgcacaacgcccttggttataaatgcccttgagacctgaaaacacctggtttccgagactcttgtcaactatttattccatcacgtgagctatctgaaagtgaaaggccatctctacgcttcatggagaaagtaaatcaggctgtgtccgacgcccttgaaacgcatcgttcaatccgaatcctaggtgacctgcctaccgaaaagctgaatcgtgaagactatctggcctcgactcgtgaattaatcgaaagcctcgtcgattcttggaaagaaaaggcggatttgcggcttttggcggtggaggtttggccacgacacacctactttgcactcgatttcaacaacgacgagtacaactatgacaacgcccacactcaagtggtagtcatacctgtctacctgcttcggctgtccaggaaaagccatacctggacaatctttcggcacaagccccaagactcatcgctcgccaaaagaattgcggacctacatgaaggcaatgggcaggatcccattcccttccttgaagaccacatcaaaggcgtaacacattatgcccctcggaatagcaaaacccctgttgttgcatctgagaaccctacgtgaaaaaatggcccacctccacacaatgatttagtatttgagatcctcattatcgctcgtaatgagataatcaaaagaattgaatattatggagggttgggagaaaaggttcaactattgtcgcatatacgtggatttgcttgctttggcctcgtggatggttaattaagagacccacaaaggaacttggaggattcatatagacgatgtcagtcaaatgaatatcccggcgagaaattctgcggagatggactcaacaagtaacgagaccctatcgtcagctgctgcgcaatttgcaattgtttcattcaatctgtacagatcatgaactgagccttgtacttgtaacaggggatcatctgacaagccattaacacattgaaatgaaagaaaaacgtggaaatttcgatgcacagctgggaagatggggctcggaatgctatcactgcatgtgctcaatgactacagtacacttcccatactatatacatatcgattctaggaaattttagctatggagtgtttggacgagcttactcgtgataaccaatgattgccgcacacttttgcgctagtttgagcaagccgcgctccgagactgaacctactgtaagcagtttacgtctgctcaaaaagaaaatcgtttgttttggggagtgcgtttagttggttatctaggttatagaggtcgatctgtgtaggaaatggagctggccgcgttaaatggaggaaggcgtatgattcatgcaggaaatttaaaactcaatttaacattttgatgcacgggaaggttgtatttaattgagatttgatcacttctgaatgtggggtcctggactactcgaagcgccaatactaaatatcatcatcttgacgggggcctttgtcttctgcctactttcgcgtcgaacggagtattaaacctaagtgccttagctatatggcattatgactacagttaactaactagttaaccggtatggattcgtagatgattcaatttggatggtatcggttagcttgtttgttaggtatatggaaagaaagttaacagcaggcacctgtttgaggaccttctctgtaagccctttgagattttcagcggatatatatatcgttgagagtcatggtgcatactacatccacattacgtacaagatcgcgggtacttgtattggcgacagatataaagcgacagagatgagacaccttctcgaaatagcctcaaagctggatagcgctcatggaatattcgcgacgcacatatagcaaatcaatgctatatagtccatggatcatacaaaagtcccgtagctaacccaggtccacatcattggctaccattgtctgattttagggcctgctacaccactgctcgtggtgtaggcccaggctgatctcatagtttgcttttgcggagagtatttcgcagactgaaaactagatgtacgtaggaagtctattagaccttctgccaccaccacggcggtccttgtgaaactgtgaattagagaaagaggagaacatcagaagagcgtcagtaaagcaaatcttagtaaatgttctaatgctgttatctaatctacataatggcctgagatgacatcaacaaaggcggacggtcctgttagccatcagtcatgatatgtgcctaatgaggtaggtaaaaataagtgtcttagtaaaagagtgttaatatcatatcaggctgccatttacattttatgtcgatgaaccattttgagaccagttattataatgagtcaagtcttaatcggctgcttttggatgcccgaagtttctcatttcgccctcacgtgatatcaccccccacttacctccctccttgaatgttaaagaaaatagttacacaaagcgaacctcctgtttcaataaccaagaacgaacatttgtctcttcctcttaacacccatctggaatatacaacctcccaggtcctattttgatctgtttgttttctttatcgacttcttggaatgtacctttgcttacgaaatgtagttccgcccccccctccttccccccctccttacttcgtcaccctctctgtcacatcgcaaacgaacgttttacgaggctatattttgtcgctttgttatcaatgagtatgacgcagggaagtcaagtcataagatttgacactgcagtggttcccgagaaggaggatttggaagaggtagcgagtaaattggttcggttcgtttcaatcttttccccaagagccaggctgatcgcggacttaggcgtctgaaggactggcgatcaacataaagctagagattgatgaagaaccttctcatccaagatcgttcacaacagccgacgcttcggtccgctgcgtccttgtttgtaagacggggacgatgggggctgtcaggataactggtcctggggccttttataaccttgtcactgggccggaggagactgggtgggaaattgttgcagtgaaggcagagcagacctgcatgtttattggcgatcccaccgtgcgattctttcgcacttcgcataaataatgatactgtctagtgctgcctgtgcttcataacatattgcacgaatgcagcggctagagtttgggaaaactcgatttttgcatccgtctctctagaaaggtagatggatggcagtgtgtcccccaatacgggacagtccatttgcaggtgcttctccggcccttgatattcatgcaagaagttcatcaagtcttttacttggaaatctaaaggaacagatccggggctgggtgtcaagacaggatggtagaggttcccagggactcgaggtgcaaaagaacctgtatagtattcgcttagctcatcaatttcattcggccattctcatatgattactacctgaagctgaaggccaattctgttcggcttgagggggttttggggcgtccgactgggaaagacctaggacagatagtagttgttagaatggtaagatttaatggggagcattgcttgagacctttcgaatgtttctccccgatcttctctagtactgtggttgaaaatttctctttcatgtttgcgattgtccgaggtaaactcaatcgaattatttccctagtagagcgtattgcatacttgccgaaagcgacaacacagaggaccaccaaagcattgccttgtttaggcccagaaagatctctcactttaattaggaattcttggaaactgtctgattgctctgaatgagcagacaagagtgtgaatgcttccgacacctttctagcctcgtcagtcttaaggtatcctcggaggtcgattagagacgaaattttttggagcttttccaaagcgttgtcttcaagcaatcctgcataccgaggccgtcgcctctttgcggcgaggcggggggaagatggcatcaggagagtgccaggagagtgccaggagggtgtcaggagagtgccaggagagtgccaggagagtgtcaggagagtgtcaggagagtgtcattcgcagcgaggcggggggagatggcaccaggagagtgtcagcagaggtcacgaggggctagatatacacttacataagcagcgcccgtgtgtgtaactagttaactagttaattattggccaatctgcggatgataccaatcaatgctcctgggatacaccgtaacttacaaaattgacctgccacccacctggctccggccttagtattgattagagacgagattttacttggttcaagtgtccatttatcaagtcctggccaattaggccatttaacgacgtcagtggggtaccaatatgttcatagggcaagtactatttaagtatatagaatggcagacctctcccagcaatgtccaagaaaaaggcaagcatcatatcgacaaaatggagtttgcccctcacggtacgctctccaaccactacagcattataaagctaaccaaaggacccccagatcctgataaattcttgcttggattgagaaaaatagggaagagcatctatacatgagaatttcaacaaatttagatgatctaagagcaactgctacgtcaaaaggattgtattgactatgactagcgtaaataaccgtttcttattttgctgaatcatcgggttatgctggggatttacgcatttttgggcaacagaggccaagcttctaacgaacaattcttcttccagacgcaaagctgatatgtttgatctaccatgatttcgaggagttctgagatcctgaggatgaccaggatgtgcagtcgaccggtagcaaagcggggtgtacgtggtcgcattaacaaatattcaaacgacctcggggctttgctgaaggaccatcacattcccgctatcccaagagaatctgccagatctctgggcctcatcaaaggcatagccttcagtttaaacgttcccaggagcaaccaactctcttatccctaggatactccggatgagtcctcagataagtgaccggcctctgaaaagtcagaatagccctcagaagcaagattcagtccaagacagtttcatgagtcggtattcattcgatgaagcgtttaagtgaaatcacatggtttataatagataggataggccaaaaggaatataagtttctatggcaccatacggtcatggtaccatacaaaaccgtgcctgtttcacgtatctctgaaattacagatgtcactagtattgtggcttatctgtctcaaagcggtggctgtgcaggctggacgtaaaccctgtaattaccttacatcggtagataatgagcaattgtatcgaatacgagcccagaacatcccttgactaagctgattaccgaaatggccggactacatactgccaagctatcatcaatcgagtctcaagttgtgattgcactttccgcaaatttgattttctaaggtctaatgtatcttcagatataagccacgtatatggaagtaggctgtcgcgcctttcccatatatataccgatttgctgttccaagaatattcgtccttattgtagtatttcaaagaaggtcggttaatcattctggcgggatacaagatgaagtccacctggttttttaatgagctcgttccttctaaagatagtgaagaatttattttgttgatgtggctttggtcgtgcagacccttgaataacatcaattactaagcctgtcatgtgtagtccaacagcatcgacctggcaaacataggcaatataataagataattaaccggtatgttgacttccgtgtctgcaatacgaagctgggaagtcgaggcgcagcgggttgaatgagaccttttcaatagattaacaaaccagaatgccgcatcttcgctccaatagacgagctcttcctgttttgtcgaatatcttgactcttgattaaaggacttcaggtcctacgacaggaagaagcatggtccggtaatttggagccaggggtggcaaaaggatgcctataagtcagggtggaatgatacagactaaagactggcaggcgaagctcttgataatcgtgacatagacgataatatataataattctactgtaccagctcaatagtgatgggaggtgcgggagtttattttcaagtgtattcatagcgttttcaagcgctctctttcgggtgtaacacttcacctggagccttctaggtttccgaaactttggaccatataaatctcacctaaatagagtatcggtttagaccagctttgagggaaagtctcaggtatctcacagccattggtctatatcgggttttgggaattggttgagaaaaacgggcatcatcatcaggccggttgcttggaagggcccattgttggtttaactcaatcgcgggaagcacacgagaactgactttgtcttcgcgtctggggaaatggtaagaagagctcgcgcattaaaattggggcttagtacatgtaataagaccgggggattaagcaaggatctgttttctctcggttatcagtggaccttctgaattcagtcagctacaggagccctgcaaattctcaagctccccttcatacaagactaaaagccacgtacatcctcttcttttaatcgaccaagttcatggacctctggggccatacttttgagccagttggcgaacttaaagtgtaggagggtcaatgttggtatgtctcagtcaactgaagcacacgagacttgaaagcgtccctgcgtctaggaagaagaaaagacagagcttatgtaaacataagtggattttagtaggtaggtggaattcaactgaggggttcaagcacggatcggagggaacagatctcaaggaaggtcatgttacttaatccagtcagccacaggatccatgcgtagtctctcggtaaatacaccatcgtacaagaatggagcccactaaatctttcattcgggcctttgggataatttcccattgtaggcaaaccgtcattgtcctctgcggcatcggaggaatctgcataataatgtcacataaggctttgtttgaatggaacaattgggtagggacaaacttggaataccgacgggttggaaacctatgaacagtctgagttaatccttgaggtgagataaacggcatgtctagtagtggatcagtcagccgaatgtttcaaggttgagagctccgaactttacatacgatgcagagagttctatcgtcgtatatataatatttccaaccgtgtgcaaccgttctgtcatgagtcgcacttttatgcccccaaaggaatcaggacgatctcagtccagttcgtgcatagtaccgttggccgagcgttcagtccattctctgagagtgtcctggaatccaatacctacatctccgttgccccgggttgctgaccgaagatgatattggactttatgactgagcctgctaggttccgattaacctaatactgatgacagcctccctgaagtagtgtcaatgaaagacgatcgatggcatagtactgttgttaaagccttagttgtacttttggtagctttgagtaactttgagtttttctaaagggcatagatgctccgctgcgagcttttgtgtgggtagtaggcccagtaatgttgattggttggaaaatcgtgagcgaaagaaataccaatctggagcacggttagttgatacagaatgagtgaatgaaggctgaactcactgtggtatattcaaaagcagtctttttgtttggctaagtagtttggaggcagagaaatgatgaagacctttgtttttggagcaactgactaaatatatatcccttttgaaatagcatcactttaggcagatatactaagggggaggggccgatatttagagttcctaggattcgaatgacatagctatggggcccttagaacaccttagtaggctcctgggaacgccccgcgggctcctaggagcaccatcggcgtattactgtggattgcttgtccttggcttacagattacttagcaatagcacgaaagccttcggcctgtgcgctcattggcgagagaattagttcatcatcgtcacctgctaaacactgattcctctagctgccttgatacagggaagggttctagatctttaaggaaatctatccaatcgcccttgccctggtagtagtccaaagcccgattaggggatagccgggctggtaagcgaagtattccgaggggtattcctaggagcataggctaaaatggtaaaatggtggtcaattgaatagccccactgtgagattttttacttggataggatcgagaccgctaggacgaacggccaacgttgaccgcgcccgtccttttttgatggccgatttaaatgggaagtgttgcacgtgatgggattagcgtgtcgcattttattgatgtagtttactcaggccgctcatccctacactcagtgagcactcagtgagcaaatcagagtgctcagatgatgatcagtaagtggatcagggtgctcaggggatgatcaggtgatgctcagtgagcagatcacgctgattatgtaatgatccgtgatcaaattggggtactcagggacgtgctcagttttactcagtgatcaaaaagcggcaagaggtgagcactaatacggaaagggaaaggtctcgagttccaggcattatccggtacatatgtaacattgtggaaggtttcagttctgatgatgttgtacgctaacagtagtttcacattcgatctatcaaccgaagaaatccccggaaagccataatagaaggctatatacatggaaaagtttccgcataccaattcaagaaggcatagatgatatctatgaaatgacacccaaaaagacatctaagacaactactattaacctaactagatcatgttgttcttaacagagaccacaaacgcacccgactattcttgtttgtctaatacaacatagatacggcataggcattctacttaaaatctcttgtcttaagtgacaaacggggaccctgcataggtttgaagcttcaaccgcaccccgttccaaatgaggcgctctcactggcaattaaggggtctcaggccggttgttcacatagccgaactaaggtctaagcgacccgtcgaatgggtctatcagatcgtttaatatcgtatccgaaacaggtcgctttaaatatagaccttcaaacggccctatggcaaataatggcaaacttcttgtactcccttgcaaacttcttttttaaaaatcccctgtgacacttcaaccttggaaaaaaagtattctgtaactgtccaactatcatgacgtcgctcatagtagctagcctggctgtactaggtgctctttatatgtggcgtgtcaactctgctatgaaagtagtccccgaagaggcacggaaactatcacctcatcgttggacagtcgaagaaatcaaagcagcttacaaaaagagcctagaaaaccctatcgatgtgactaagagcctgccaccaaaacaatcccgacgatatgtgatcgtaggcggaactggtaagtatacatatagatcgcttttcgatttcatttactgactttccgaactacaggcctagttggtgcttggatagtctcacatcttctcgcacggggcgaagaccacaaggcaattcgcattctagacctaatatctccagagcaggacatcctcaacaaaggcgtgggctggatcaaaaccgatatcaccgacgagctcgcagtaacaacagcattcgaagagccatgggctgccaatgtcaccaaccttgccctaacagtctaccacaccgcagccataatccgaccacaggaccgactcaagagcttcctaccacttagcagcaaagtcaacatcgacggcacacagaatgtcctgaacgccgcaagagccgccggcgccacagccttcatctggacatcctcaggctccgtggccctgcaccgaccaaccttctggatcgcgccatgggcgacccagcctaagcgcgtagtccaagtaatcggcgacagcaccaaactgcccggatctcactaccaattcttcagcaactacgccgtaaccaaaaccgaagcagagggcctcgtccgcgcagcagataacccagcaacaaacttccgcaccggctgcatccgccccacgaacggtgtctatggcacaggtggccaagccaacaatgtcatcacgggactttacctccgcaacggtggcagtccgacctgggctcgcccaatcctgcagagttttgtgcacgctgaaaacgtctcgatcgcacacctcttgtacgaacagcgtctgatccagcagagcgagcctggttcgcagctcccaaatacaggcggccaggcgttcaccgttagcgaccccaacccggcgattgcatttaatgatttgtacacactactcacgacgttgtccaaaacgccgctttcattcccggaggtgcagcccttgccgttgttggtgatggcgtattttattgagatgtatactttcttgcagtttagatatctctcttggttgccgaggttgtcaggggatattgggcaacttcagccgtcgctgttttccattatcaatgttcatgtgtttgctgatgattcgcgcgcgaagctggcacctgagatgggtgggttagggtataacccgcctctaaacacactcgaaggtctgtgtcggcgccttgtggattggaatacgaaggccgaaagagagggggttgaggtcatggggaagaagatacggttgggccctgtgcaggtttcgggagatggtgtcaatgtggtcgccccggtgttgtgagggggatttgagtttgttcgatttactcgatctgagtggaggagcagacattgcaccgggttatttttttatgaacatgatatggcgtacaattaaatctgtacttgatcttaggagttcggttgtaaactggaatacgatttggcgtgaaatagaatcatatttggagataaccttagaggaactcattgaatcttctgcaacttccaaaatttggaaaagccggggccgaccagcagtacccgaccatatcacggtctcattcttcctcaatcatcattttgacacaaaagccattgttaaagccggcatggaaattgataaacctccatagatagtcgtagcttgagattgatagtgacctcgggacactctgccgaaacacaccgagaacccagtgtcgagccgtgtgggcgagcagaagtcctcggtgtaaaagcaagagcgatacacataggccactttcgaaggtattcatgggcgaagtaacaaggccatgtaaatctcaagtcgcacacatggcactccaccatgcaagcgttccatcaagcagactgtgcgaccaagaacttgaacccctcagcagcagaaggtcgctagaatgacaagcttctatttctcagaaagatagtcacgaacaagacgagagttctccttagtgagcctgttgctgagccacttgacgcatatggtcaagacgctgcatgcgcaaacgctcagatgccacctcaacatcaagaatcgccccgagacggttcttccacgtctcctccagactgactagctcgccctggatcgcctcctgtgcaatttttctctgcttgttcacctcctcagaagcctgtttcgtctctgccaactccttctcgagagaaccaagtatctcctcaagctgtgaattgccaatcagccaagcgttcttgccatgctcttctagcagagccaggttctcgtggcgcttggacaggtgcgagcttgacgaatatgccttctgcaaagtctggcgccatgcgtctaggtcgggtgcctcggtgtctgatgcgcgagtcggggcatctggtgcttcgtaacgggatagatcgattccgcctgtgagaggtgctccctgcgctttgcgcgagagttcttgttgcatcaattgagagaatttgggttccggcagttcggggatccaaggatgcattatggaggtgtgctctggggatagctctgcgttgatgagctgctgcgctcgcgcttgcgcggacgcagtgggcgccgcgtcgatatcttagaacgttagtgattgggacttcaatgcacatctcttgtccagactggatacatacatggcagcgagtcatgagattcgttgattaacggcattttgaagtggttttcttgtatggatgtcaagatcaagacctgtagattaatctgagaaccacatgaaggcggcgagcccttgagtatcgctgactcagctagtattgaactaataccacgtgaccccatcttttatatgtaccgaggcagaaacgaacaaagtaaacagttctaatttgcgaggcaattagtatatctaacgtgaatgcaccaacagcttcattcgagtcatgagataggttggttgtgtatattgctgcagcaaaaagcagggatgggaccagcatttcccctctaggaatgctctcaacgatgatcctatccagtttggattattttttacgcgaagtacctgagtctcaaggcaagcttccagcccaccggataaaaacaggcaattcaatcttcaccagcacatcttgtgcggggggagtgcagcgaaagtctattcccttttaggtgttcggatgcaatggatgacgatcgcttagacaaatgccacctaccaacctcgggagtacttcatgtacactaatgatcagcttcttcaccaggcttgggagtacttgtgtaatgattttctgcactcgtaggtcgctcgttcgtcttcccactatatcccctaccagtgccctcgtataagaacccatatctccctgggatctcaactcttcaagggctacagttactcagcgcagatttatctattattaattgtgattgtattggaatcccttctccatgatggctcactttcgcatgggcgtgacttttgttggggtgactcttgcgctgctggtgtttttgcagctgagtgcggtattcaagctcgatagccagtcgcagttgccttcgcctagctttatttcaaacttcaaccagtggagaagcagagcaagctcggcggcaactgatatctttgtggtcggagcaggcaaggcagacgtaactgggtatgtttatgcgttaattctgacatatcaatgcactgagttggctaatatgattactaggcccgttgtggagcttgctcttgctggctatgccaatttggaccaactaggcactggtttaaagcagagactgtattctcacgccttcatcttcgcagacccagataagcccgatgacacttttgtttacctggttgtcgatacacttgcgggtgacacggccgtgcgacatggtgtcctggagggtctcactgcactcggtggggagtatgcacggtacggcgaacacaacgttgcaatgacgggaacacattcgcactccgggcctggagcgtggatgaactacctgttacctcagatcccggcactaggcttcgacaagcaaagctatcaagccattgtcgacggcactattctgtcaatcgtccgtgcccatgagaacttggcgccgggtcggctctcttttggatccatcgacttgcaagacactaatacaaaccgcagtcctttttcatatgagcataatcccgaggaagaacgggcgcggtattctgccaatgttgaaaaatcgctctcgctcattcggtttgatcgcgaatccgacaataaaaccgcggctgtcctaacatggttccctgttcatggcacatctatgtacaacaataacactctggtcagtggcgataacaaaggtgttgcggcttacctcttcgagcgcagcgtccacggcgatgcgaggttcaccgaggatgccgtaattggattctctcaggcgagtgttggggacacatcccctaatatcctcggtgcttggtgcgaagacggctctggagagatgtgtcgatatgaagatagcacctgcggtggcaaaaacgagaattgccatggtcgaggtcctttcttccgcgagaacgacaatggagcgaagagctgcttcgagattgggcgccgccagtacttagcagcaaagaagctttacgaagagatggacaccacccctatcaaaattattggaggttcagccgtgaagtctttccatgtgtaccaggacatgaatggctacactttcccatcgcctttcaactctagtacgctaacgacttgctctgcggctctggggtactcgtttgccgctggaactacagacggacctggtgcctttgactttacccagaatgctactggtccagctgaacgcaaccccctgtggcaagttgcgcgtgcagttattcaccagcccagcgaagcgcagcagcagtgtcaaagtccaaaagacgtcctattggatatcggaactcttactgaaccttatgcttgggccgcggacattgtcgacatccaggtcttacgagtgggtcagctgttcctcattatatccaccagcgaagctaccacgatgtctgggcgacgctggaaggaggctattgcgaaagaagcaaaaaaccaacttttaatttccgatcctttagtggtactaggagccccatcaaacagctacgctcactacgtggcgacagaagaagagtacggcgctcagcgctacgagggcgcgtccacactctacggcccaaacacgctggcaggttatgtcaatctgacccttacttatctgccatatttgggaagttcctcaggagttgccaaactcccagccatccaacccggccccaacccatcaatcaataccaaccgttccttgagcttcattgcaggggttgtgtatgatggagcgcccattggcaaacactttgggaatgtgacttcaaacccggggagtggaccctatggccccggagatattgtgaagacgacctttgtgggcgccaatccccgcaacaatctgcacctcgaatcgacatacgctgcggttgaaagaaaaagcgattctggcacatgggaggttgtgcgcaatgaccgtgattggaatttggtcttcatgtggaagcggaccaatgagattcttggccatagtgaggtgacaattcaatgggagattgaggatgagtattataatgtcgacactacgtcccccctgcaggctgggacctatcggatgcattattatggagactcaaagaatatttttggccaaatctcgccattcgagggcattagtgagactttcacagtgaatacttcataatctgactcattcagaatatgggtgtgtgtggcttggtggcaagttgaatgaatggtgtcaaataatctaattgccaaaatgtacaacccagtaaccaggcctcagtgattatatcttcacttacgcgcccgtacacgtagcaaatgaattagccagacactctcggtctacaaatctatctggtccatatgtcaacatggaatccttgataataataataaagtggtcctgcacctgcagccagccaatcaccacgcgccatcgatcaaggccgggcgcctactgcgacgtctctttgtcgcgcgatctatttctagcataaattcgtctcacaaagaaccccttgcaatagcggttccctctgggaatgatactactgggttgtttcagacttatccatggaaaagctcccaaggatgaacaatgggcggctgacaggaagccctaagccgacttggccagaaaccccagagtgcagatatatcagccagggtcctcgaaggcgagggctttgaaagagaaatctctttcctaataaaatctcaggttgcttcatcttgccccattcttttgtttctcttcatttttgtggtccctagtgatccagtcattctttcatctgcaagccatcaagacgcctcctaggccttgtatgcattcccattaatttcataatattttctttgggtatgcttttttatacatcggattgtctctgttttattcaggtgctctagtatatctctgattgagcacccaattctctttactgtcccactttgtcgaagtcgtgtcccggcgatcacttccaacactctcgtttctaaaccaggatgcttcgctttcagttctttttgttccttcttctgccgtggatggcttcggctggtccgatctctcgctggttgtctcggtcattggaggcatcttcgccgacttatttccccttattgccggatatcgaacggcgtcaagctggcggtatcaccgcaatcacgcctgtggcagcacctacccagcaatcgtttacgtacgacgagccaatagtacttacccttttctaaaccattaagtcaaccacctagctaaccatcacttcaaagccaactacataccatgcgtcatccacaactcataacacaaccaccagccagaggccaactacgcagcagccaactccacagcaaccaaccacgactcatagtacaactactagtcagaagccaactatgcagcaaccaactacaactcaggagccaactacaactcaggagccaactacaactcaggagccaactacaactcaggagccaactacaactcaggagccaactacaactcaggagccaactacaactcaggagccaactacaactcaggagccaactacaactcaggagccaactacaactcaggagccaactacaactcaggagccaactacaactcaggagccaactacaactcaggagccaactacaactcagaagccagtcatcacctctcatgtgtccactaccactcggcgattcatatcctcatccacaaacccgggaatgctgctttcatcaacaataactagcgtattacctgcgtatattccaggctcaacatcctctctcgattctttggtggtgccgagttcagcccaatcttcatcggctacgcttctaggtggaacaaccagcatcaaagctaccacagccacatcgccaatatcgacctctacgaccatacacccaacaatatcaccggtgcccacagtgcccacaagtcgtagcccaacggtcggagtcattctacctctaggaggagcaagcagcagcaattattccacgttcacaccggtggtatcaacctccgattccatccaaccagcaaaggctacgcaggcatccatacagcttcttacctcagaatccaagccagtggtgaccgtaaccgagcctgtgatcgtatatgtgactcaaggagcgccagctcccttctcgacaagtgtcatccatcacgcacctagtgtcaatagttcatcggtatcattggcaaattcaacgtctgttgaaccaacaactacatctttgacgtttgtgaccatccattccactgcaacatcggttgttcgtgtcactgtttacccaacatcatcaccatcatctgcttcttcgctttcggtctcaaccgggagcacttcgagtgtgaatgcaacgccagttgttcctatgaccggtgactcgacaacactttcgcttccttcatcgtcttcgttgttgtcgtcctcctcgagtgagattgcttctgtggtaacagctcacgtcacttccacgagtgttgttcctctgactgttcacccaactacgtcgttgcctgtatcttcgttgttgccgtcctcaagtgagaatgcttctatagtgacaatccgtgtcacttccacaagtgttgtatcagtgaccgtttactcgacaacatcgccatctgctccattgttgccgtctttaagtgagactgctctgcgtgagactgcccctgttgtgacagctcatgtcacttccacaaaaacaattcgcgtgaccttgtatggtactgctacccgagcagcgaaaactacacatacagcagatcccacatctactgtggatgccaatatcgctaccacaacctctaaggcaggccaaggcatacttactgtgaatccggttacgccgcctggctttatcacgatcactgagactgagacggagacaaagactaagacagtgacagatcgcattactgagactgttactgccaccgtcactcggaattaattgtatgattgggaggaaattgattcttttatccttttaattattatgcatggaggcttctttcgctgagtttttttctttcatatttcagactaatttctctaatctatgtcgaaatgttctttatagctacaagaatactaagctttattcaggctaagccataagatgacatgttctgtcctctgtacataccttagcttttgctattgtatatccaaaataaactttagagatcatgtccgatttagacccatatagatcacatcggctgtgttttatcatttctataatataggcgagtctcccaaggtcagacaaacccttgcaatcggatagtactatgagcacaaccacctctacctcgccttccacctaaccctcccaacccagatagcccagtcccgcacatcctccctctcacatatcctctcaacagtaaaccactccctagccagctcctcattactcgccatgcgatgcacgaaactatgacaagcgcgacaaagccacgccacactattcaacatccactcatcatgccaccccctcttaacgaccttcgcatgcaccccgcggggaatcaaatggtgatatgagagcgggatccagtcgcgctcgcagatctcgcacgcgtccgcgcgcgtgctcgcccatgccagcgggccagtcgtcacgctcgatgtgtactccgccagcacgggcgcgaggaagtccagcaggtctgccgcgttgggaatgatgccatagacgactaacgagtcggttacgctaacagggattagagagaatagggtttcgagcgtggcgcgtgggaggggcgtgtcggtgtcttgggggatgtagagggttgatagggttggatcgtgttggatggctgcgtagcttagggtttggagggcggttgggaaggtggtgaaggtttctgaggctaggaacttaggttgttagctttgagtcctgtcagttgttggctgtgatgtgtaggtttgttgggcctgattgctttgcgctaggttggacttggccgggtacaatgtacatcaacaaattcggcgagctcttccgggtctgcttctccctgttgagaggttgtcgctgttattacgtctttgcgcccggtgcgcttgccctttggcttccgtcgcgctggcttctgtttttcctctgaacgagccacgatggcattagacagacattcgcggaacacagcataattctcattggaagtcattgagactagccttgacctatagctcggtccggaggggatgtcgggcaagtctgttttgccccgcggaaaattgacatcattcttcagtgaccttcttcaaggctccgaacttcactgcctttgacctcgagatttatgaaacatcatgacagctaatacagccaatacagttgtcgcttttgatttatatggcactttactctcaactcaatcgatcgccaaacacttagagaaacattatgacaatgccaaggcgcagtctatctccgcgctctggaggcggtatcaactggagtacacatggagattgaacagcatgggcaagcaacacttccaggcttggcgctcaaattattgacgatcaaaaggccgctatgaagacttctcagtcatcactcgtaactccctactgcacgcgctagccgataacaacgagcagctgagcaacgacaacatcgaacgcttgatgcaagcttacgatagtctctctacattttctgacgtgaatccagctttgatcaacatcgctgcagacccaaccatccaagctgttatattctccaatgggacgaaaaccatggtaaccaactcggtgttgcgatcaaaggacctttcgccgcacgcgagtgtctgtcaagaaatcgtcaccgtagacgaagtccagcaatataagccatcaaaggcaacctacgagcacctagcgaagcagataggccaagatccgtcgcagatgagcaaactttggctggttagcggcaaccctttcgacattgtcggggcgcgcgctacaggcatgcaggctatatgggttgatcgtgttggtacaggatggaaggacgccatggctccagatctacaaccaacggccattgtacacagtctggagcaaattgtgaacgagattcatagccgtcgcctttaagctagggcatagagaacaaacttcgaacggaggtatctagacactagacaccaagagaagttgtgaaaggaatgtacagctgaatatatttccaaacgctccacacttgagtagaagagtttggggtaagccagcagatttgctctttcctcccatttcccctccagaacagtgattgtaacaaaggttcagagtgaatagggaggaattcagtttatgtgaagaagaaaaggaagagggcgctcggcgaaaaatttctcgatcaaatagtacgagcttagtcatccgactgatatcccatgggtcacgtgtgagcttcgcttatcgataaggtgcctgtccagatgcttttgaactcgtcgttggcaaggaatatttgaaccggtgaaactgcaagccatgtcgcgactcctggatcccagccgagctgcttggctttaccctcttcgggtatgtcaatttggggcctcctacgcttcaagactaacctgaacagggaatctactattttgcgtcgaatcgattcctatggcctttcttcaaggcccgccttgtcccaatcgtcctcctttcttccttcatatacttcatcctatttttcttcacctacctgccccaggttgccttccttgccatctttcagggcagctcggcatgggtgagcggcgcattcctggtgcttggtgaaggagctgcaattgttgccgccctcttcgaggcattcttcgtcgatgagaccctagtggatatattcgatgcagtgttagtaaatgagggtcaggaggagcttgttactacctcgcgggtcatttaccccgagcctggcaaccccgccaagcgtctaggcacgccgaccaccagtgccgtgtattctccattttcgttgcggcagatcgccgagtttataatcctgcttccgcttatatttattccggtggccggcacccctatgttcctaattttgactggctatcgtgccggtcccctccatcactggcgttacttccacctgctggacatgtccaagcagcagagaaaggaaaccatcagtcggcgtcagctgcagtacactacgtgggtcatgtccatttcctctgttgatatgagatctaacgcactctagctttgggacgatggctctgatccttcagctgattcctcctttctctatgctatttctgatgaccacggctgttgggtcggcactttgggcgacggatatcgaacgcaagcgacgagctctcaaccaacagtccagtcgactgggtgaacaatacagtgacgatattatgccttgacctgtgaacgatatgtctcgagattactgcaaatacatctaattttccttttctggttcctgattcagctttgatctatgccactagggaggagcaatgaatattgttaaatccaatctaattccctctccgtgattcaattcgaaacggcggacttgggaattgctttttcgagcgctgtcatggtaactccctaatgccttccgccataaaaaagacacgtccgcgccactgttcctcaccttctctcacttttccattctccctgcttctctgtcttatactcatcgctgtgcctttgcattttcgcccgctcaatcggactcaccgactacgctaccaagctggagacccacctcaaggctttgatagattgaatttacatacgcaggcgtcgaggcataagcagtagttgcaaatagttatcaatcccataactaattaaataaataataatataactaactaaccagatgtttaacatacaacataaatcggtgacgggttttcccgactaggtctagcggcgctctgcgtaggtggagccccggggagcatcggcctcaggatccatgtgtactcgactaggaaaacgggaaaacggccgtttgtcggcaatttcccaaaacctcaataagttgtgattagggagatctcttctaccctaatgttgcatcagagtggtctttcctcactccttatcttgatatccacggtaatatgattgacaggatggacctatccaaccaaccgctgccaggggggctgccctcggagatctggcttcacattttcaccatggtatgtcttgtaaaacgcaaagaaatcaataaaatgccaagctcacatcacaattcagctggattgcccctcccagtgaacaactcccgtggaaaagttatatccatcccactcatttgtgtgtgcatgtgaaaaacattgtcgtggtgcactcctatggtgtttctccttaccagtttgacttctgtgatgagtttgtggaattcctatcatacctatttagggtggcagacaatcttcagaactttcagtatgttgctttctctttcgttttgacacagcgctgatttcctttagctggtggcatgagagatatatgccaggggaaattttgtaccatctttacaaatactgtccccaagcaagtgtccacattgctagctcgaaagttgcactatgtgagaaaatcaacaaggatgattcatcggcacctcaactctcctgtatccgttcaatcgaatcagaatggtacaccggagagtatgatagaccaatcaggccaagttcagctgcaagctatccagctgaattgaaagatattatttatcgaagtaagaacctcaaaaacctcacactggttagcacgtcaaattggaggccgctttccaggacgccgcgtcatgatggcgacatctcacctcatgtcaagccgagggaacttgaagcccaaaggaatcagaggggtctcattacgttggaagaagggaatattcttcctcaagtcaaaaacattcagttccaaagtatgagatttggacctctccagagcacgttatgggccacacaatacaatggcataccatcaaacatttatccttgatcgccgtcgattggattcacttgttgcccaagatcactgctcctagctgctttcatgcgctagagactctagagataagcatttattataaaacagaccgccctgaatctatcgaacgggtggagcaattccacgactttctgaaagagcttctacctttgaaaatgtttatcgggtatggatttccacagaaaactctgggggtattggcgaaatatcacgccaaatcccttcatcacctacggtttcgatcttcattgagactcgatcttgacgggggaaaatctcctgccagcattcacaatctcgtcaatctagccgatcaactcccgaacttactatctctcggtattaatctggactggatgcccgacgatgaaatggtgagtatccccgccattattttaccattaatggaggcttcccagtcgctaatattactatagccatacgatcttctcgtcaacattgttcaacacactcatcttcaacatttagaactcaacataccaggtcttggttgttatcactctgagtggccttaccccaaccttaacgaaatgacttgtcgggcccttatcgagttctttgacgagacgtccctaaaccttctctcattacatttcgtcattggcgactgatttccttttgggcctccaccaattctacaatggtatcaggcagcgttcctggtcggcgagcgagactatgcgggtcatatgcgcatcagcaatgttcggcagtacaggcaacttcggaaaatgatacgcgaggggagttttgttccacgagtcccatcgcgccagctgaggggggactggcccactgatctacggcaggatatagaagaccgaattagcgacctcttttgtggaaagatgccgagaaaagaatcttggtagcggatatctgtcacatacatcctcactgttatcccgcgcttttcagagacaatatgcaatatcttgatgtcgaattgagatctttacctctttaccagggcacatattctaggaatgtcttatttcatagatgaattttcgatccctataaatacattatacggtcgctcacccatacttcaaggctacatttgcttcattgttttagttccttaataatcttcctacttctcctaatctatgaagtggtaggaagagcaggaacgggccttatagttcataataccacatcatcgactactcacatgtaggagatatccatggatatgcatctccattcaaagcatccgtttgatatattcatctacagtgcagatataactctcacattcttcactttgatgtaggtttaacatacgcggcatagcaaaatgtacctgattcgagagtaatgaccatcatggaacattgattatttggatttgggtctaaccaaacaatagagtagtgtacacgaaggcaaccaccacgacttcgacgaccgattcatgcactacactaacgggtgaaaatgcagctgtttctggtgtcaaaagcggtctttttcggtgtccttttcacaggtcctcatcttctcgttgcaaaaaaggtctggaatacgagtagcacgtgactgcaccacgatccgagacgtgttttcttcttttgggaatgtattcacattataatccttggactcatctcttgagagcaaaacatcataagtacttttttcatagttaccaaggcagagagttcatataccctagactttccaggccttggacaattcggagacaattcggaagtgtgaccccgtacttcgaacctttgcccgagattatcagagcctctagagcttcagctttaaagttcctggctcattccgactttcgggacggatttcggcttatagtcaaacctggagtctggatgtttggactgtctttgggccgattaaacatgacctgactggcgtggtcatcccggcaatttgctcatcgatggaccttaaaacaaggctgcgcaaggcctgcgatgcctgcagtattcggaaagtgaaggtatggttcttttgtcatgttatgcgggggaatactaatttctatgtaagtgtgatacggctgggccaccttgtcggtcgtgcgctagcttggatattccctgcacctatgaaagaccaagcaggcgccgcgggccccctaaccgccatgcagaagcgtttaagaaacaaaggcgggaacccgaagatgcagtgtcgctgagcccggcaaactatccgtcggcgacgactcccctggcggcgccattcaccaattctcaatctgcatcgctccccttatcggtagaatcgatttgttctttgcacacgatgcagatgttgctcgatgacttttttacttacattcatcctttggtcccaattccacacgagccttcttttcgagcagcctttgagcgccgagaagatgtaaccaaccacacatttttggcgcttttggcgtcaatgattggacttttagtagcttccttccctcgacgaccgaaactccgactcaacaccgaagccgaacgcaccgctttccccaattctatagctctagtaaagcggtgccttgacgttgcgattcaagcccgcgggaccggatatcttgatcgcaacgccacagtctacgatgcagcaatcagctattttctcggtgtatgtgctgggtatatttacaacatgcgtcgatgccgtgtgtacctgtcggaatgccgagccatgctccaagtgtatgatctataccggtctccgaccaccaccaaccgcccgtcctcgacattaggacccctcagcccactatcgtcggccttactaatggtgcaggatccaccagcacataatttcacggaaagccaaggcgtcgacctcatcacccaagagctcggccggcgtctgttctatgtcaccttagtcggatatcagacattgcatcagatgggctcttcagatatcaaggttcatgttcctccagagacaccaacggaccgttacccaccactcccgctggagatcgatgatgaatttttattctcaacacatgttgagccgcagccgtccgaccgagtctcacggctagtcgggttcaatgcaaatgttcgcgtctacagctcatataccgccctgctagcttgggaaatagcgtttggcaacggtcaaatctttgattgggagcaccagcgcaactgtatttgggactgtctcaagaaagcaaaatctgcactaatcaatgttcctgctgagttgtctctccaccatccgaagcacacatccccggcatgtttgtcaggtctcggcggcgatgacacaatcttcagctactctaatgatcatatccaccaagaacgacgtgctatacagtatgagatccagaaagccaatatctacgctagtcagttatgcaccaggtcctatctggtcgagaagtactggaaccttttcgagacattttcaaagtatggaaagtcaccgaaattcatgacaccgggcagcaccacgccagatatcaaaaccgaaggaagacccaattcagtaccgagtgcgagtgcgactcccactggtacagccccaccagaaaccaacactcaagctcaacatgcacaaacagactttattagtcgcatgatggctgaagagcgcaaactggtcatcaaagaccttttcgtgctattacgaacagtgaacgaagtgaatatggagccgaacggcgcaagcattgtatgtcccgtttactctaaacatcactatctatcattgtatcacgctaacaaaaggagtctgattacagaccaataaaatccgccaagtagcatccaccctcctcggcctttcacaccgaccgaataaatccaacagtgaaatccccaaacccacaaccgctgcggcaccatcaccatcaccaacgaccgtgcctccaggcctccacgtcctcaccgacgcagaggcggagacctaccttcacgcatttatcgagacgcttgtccgactggaatgccattcttccatgggcgatgcagctagtcctgccgacggcgtcaatccacagatgaacggtcgcgctatgagctatctgagtgattatgagcgcgaccaagaagaattgagccagtgggcgagtttgaaggagtatcagcagaagtttgcggaggctggtggtgttttgtatcagctgtagcgtttccagcatcttcttggtggtctttcttcctcaatattcgtgcattactttgggataggaaggtcagggttctggcgttggatcacgaatggatattatatcattcgcagatatggatatatcaatggacttaggtttggtatacttcaaatatagcgtctctcatctcgagacagctaagtattcataattctatttcggtcccgcgcgagtctagcaaagcggcgactatggtccaagcatgttaaattcctacgttgtcaatggggccgcatgagcagccgactaattttgttgagaaaagcaatgaatggcattccggtcattcggccatgatatttgagtacttacacatgcgctgcaacagcaacaccttccctaattacattgattgtatgctttttcttccggtccctatagatagggatgcaacaacgcccagaccatgcaagtcaaccaaccatgtcgagagaaaaggaaaatataatacaaaatttgaatcaagatcataggggaatggagagtgtgagatgatacaaacaaataatacaagcggtcatcacgaccgcacagatttttgagatcacggagcgagtatctcacagatagcgcttctcggagatctcttcgtagcactggacatggtcaccaggtgcgaaatctgtccagttttcgaaagcgataccacattctgtgtctttgcgcatttcgatgacgtctttcttgacgttcttgagggaaaccattgcgcctgttgtggaaagttagttttgatccggaatattcgtgttgagctgcttgtgatatgcttaccatcgtagactatctcctccccgcggagcaccctgaccttgcgagtcttgttgatcagaccgttacgcacacgacttccagcaatagctgtcttttcacgtcccttgacagtgatctcgaacacctgctggatctcggcttctccggtcacacgcatagtgaccgtcggaggtagtttttcactgagaatggccttgacgtcatcaatcagtttataaataatgttgtgatccagaatctcgacgttctcagcctctgccatacgcatgatattaggatcaatggcctggttgaatgagatgatcttgcccttcgcactgccagcatgttcgatatcgaattcactgacagggccaacacccgaacggatgatattggcaaagacttcgttggtaccgactgctgcaacggagttcaaaaccgcttctaccgaaccgtccacatcgccctttaggatgaaattgaccgacttagggccggtaggttcgacatcctgtgttgtttcttcctcttctcgctctcgcctgcgcttctcgacaagttcacgacgagcctcgtttatggcaatcatatcgacacccatcttctgggtatcagatctctccaagcggtaatctacaacgtccttggctttctgctcagttggtgcctgtaggagctcggtgccagcacctggctgctctctccaaccatcgatttcgacgggcattccaggcgtggcttcactgatagtcacaccggcttgattgcggagggtgcggacacgagcccacgcggtaccggcaacaatgatatcgcctggccgcagggttccacgtcgaatcagagcagatgctacacggccataactctttgtagaggcctcgatgatccagccttccacgttacagacggtggatgcgcggtggtcgagcatttcagagagcgcgacgatggcttcttccagttcgagcattccctgtccggttttgccgctgacaccgatcgcctgaacgtcacctccataatcttccacatggacaccatgaatagaaaggtcagccttgactcgatcagggttgttgccctccttgtcaattttgctgatggcgacaatgacgggaaccttggcttgggtagcgtgtttgatggcttcgatagtttgtggtttgacactgtcgtctgcggcaacaacaagcaccacaatatcggtcacgtcggcaccccggcgacgcatttccaaaaatgcagaatggccgggggtatcaaggaaggtgatggcttttccggaaggcatcgttacggagaatgcgccaatatgttgcgtgataccaccatgttcagacgctgctacagatgacttgcgcagccaatccaaaatcgtagttttgccgtgatcaacgtgacccataatagtgaccacaggtggtcgagttggcagatttgatgtgtcctcaagttcaggcgcagcgtgtagatctgccttgccgctgtcgaagatagcctcgtagttgaactcggctgccaccaatccggcagtttctgcatcgagaacatctctgtacgtgatttcctcgaagcccatctcctccattcgctgcacaaattgcgctggccgcacgccaatgacatcggccaagttgctaacactgatgaattcaggtaagtagagaggagccggtgctgccagcgcggcggccttctttgcagccctttgggcgtccttttctttctgctggcgtcttcgctctctgcggaggcgctcgcgatcttccgagtcaaagtcggccccatcagactcactctcacgtcccttgcgtccatcacggcgcttcataggctttggcggtggcggctgttcttgcgcctctagcttctctagctgctccagtgcagacatatcccaagtccattggttcttcttgaaattgtctgcttcctcctttgtttgaggtcggtcaaattcctctgaatcgcgttctgtgtttcttgttgtattcagcttaacgtcttgttccaactcagacaagactgagtcccctaattgctggaactttctagtatactcagggggggatctggactcttgaaattgtgaacgtccgggagaatcgctatactctctagttattcgggaccttggctgggcgtcggcaggtcgagaggttttgcagaatggacacacttgctttgtggcaaaaacatgtttcatgcactgagggcagttccagtcgtcgtgggccattggatggtccctagttgctttgttctgaaattggccctgggatctgttttgtgtcttctcaggagcaaacgggttctcttcttcattcgccgctttcgttgctcggatagacgggttcctctcctgattgcgcgaggtccccttgggccacctcatgtagccacctccattctctttttcaaacggggctctctctggagtggatgggttcctctcctgatcccgtgaagttcctttgggccacttcatgtagctacctggattttcttctttaaatggattcttctcttgagtggacgggttcgtcccctgattccgtggggtttctcttgaccacttcatgtggctacctggagtttcttctccaaaaggattattcttctgggtggacgagttcatctcttgattccttggtgtctctcttgatcctatcatgtaggcatcttgattatcccgagggcccacgcgccgcacgttcggtttcctctgctggtttgattgcgctgagttccattgctgatttgactgttcccgcctccgttgtggtagtgtaggcgcgggtgcaggtcctggcggcggcggttgactattggcgacaagggttcggcgcagcgcttgttctgcgaaactcaagcccgccgatggcgtagtttgtttcgggccccatcggctgccaaacttgggcttttccggcgctggatttgagggactactatcataattcccattcgatgcatccgatgagttcaaacatgtcgccgataaccgtaaggtccgtcgaactgtgagagctgttaaagtaggcgttcggtaggctgaattcgaccattcagcccgacgcgatagctgtaggtttagttagatactgccgcaacacttaagagctgcgaacttaccctgcagactggccgacgatgcatcattcactagtctatccacatctggatccgtcaacttttttccctttccagaagttcggaatgagcttatgtcattgattaggtcagctggtgggtatcaacccgcttatgtaacatgtccgccggtaaagtcacatgcctcggcattattatccaatcagaggtcagatggcgccattgcgataagcgggctggatataaagtctggagtctccgcattgtgtgcctgtctatacttttagtcgttgcggttcagttgtttgagacatggagactgaggtaattgacagtatcgataagggcggcggtggtgcccttcgcaccatcaaggatttggccgcaggcgcggcgggtggaatagcccaggttctcctcggtatgtgtacaccgtactttctttgaattccgggggaaagccaggggcgtcatgagatgagaatcttgccatgactgtgtctcgcggggaatgatccagacatgcaaaaccaaagcaattgctaacaagaaactaggtcaaccctttggtatgtgatctgcctaaagcacatcttaggagacattgcttaacaatccggcagatatcgtcaaggtgcgcctgcaaactaccactcaatacaagagtgcgctagagtgcgcaacccagatcttcaagaaggaaggtcccacggccttctataagggcacactgaccccgcttatcggcatcggtgcttgcgtgagttgccccgcggccaaggtccactatagacaaatcctctaaccaactcaggtgtctgttcaattcggcgcctatcacgaagctcgtcgtcgcttggaagagctgaacaagaagaaatacgccgactcaaccctttcatacactcagtactacctggccggttcattcgccggtctcaccaactccgtgttgtcaggcccaattgagcatgtgcgtattcgcctgcaggcacagcctcacggtgctggtcgtctgtactcaggccctatcgactgcgtgagcaagctggccgcacagggcggtgccctccgcggtatttaccgcggccaggtggttactctcctccgtgaggctcaggcttacggtgcctggttcatggcctttgagttcatgatgaaccaggacgccaagcgtaacaatgtcaagcgtgaggatctctctaagggaaagattgccatttacggtggcctggctggtgaactcctctggctctccagctacccgttcgatgttatcaagagtaagatgcagaccgatggattcggcgcgcagcaaaagttcagcaacatgcgcgactgcttcaagaagacttatgccattgagggtctcggtggtttctggaagggtattggccctactctgctgagagctatgcctgtttctgctggaacattcctgacgtatgtttgccctttctttgctcgctcatgatgcttgtgtttctaatattgccgctaacccttcgccccagtgtcgagttggccatgcaggcactcggttaaaggccccgtaagggtatgttctaatgatgaaagttgacgcatttggtttttggtcggtttcacttgaattctttgatatccagggcttgttcaatatcctacggttggatggaggtccactacaaaagtgaatggcatttcaaagcttatagagatctatatccatgtcttacattgagcgattgtgagattatatatacctatacagtgtttccaatatacagaatttggttttctatatttctagtgtgaagtccctaaaggcttctccccaagaaattcctgctaagcagtagggaaatgacccaagttcaagctaggaaagtcctctctaacatagaccacagaagatctgcctctgtatcgaacaattggacatttagcctaggcaaggcccattgcatatttcagcctggtcagatatatatccaagtcaaccctacgagtctccggctttggtcatctacaccccccatgtattccgtgggactcgtcaaatggctatgagggccacgacttcaggaacacccacgagaaagcccggtttgatatttgttgctgacctacatggacttccacaacatggtaatgttgatgtccctgtggtaggtgaggcagcaggtgctacgggaccctctgcctacgctgtctcatcggggctacggtgagatggtggttgaaggggatggggagaagagaagaagaagaagaagaggaggaagggtgggaggggtccttttatacccctaacaacgcgtaccttcccaaatggacactctccaacgcaccttcctggaatcacaaatgtcacatgtcttctaactttggaagccaatgacaatacgccatacctgcccacacctgggcaggattgtttgttcggtgatggttacatcactttatgaccttcatgtccatttgttgtatagtatagcacttcgaagttcggtggttcggtggtggatactctatgagtccttgaagtcacaaaacaatatgtcggcacgtgggctatcttgaataaattgaaagcagcaagcagtggagatacgtattaatacaggttcggtcttcgtctcatggctcttgattgcatatatatctgatggagagaagaagaaggttgatatttgttcaacgcctgaggcatccatgcctaggcaggcaaaccctgatgtcatttgtccaggtcatcgtcaacttttcttgctttaaccttcccaagtacaacaactatgctccgtggtgatatttccatgtgccggtgaattgttgtgtatttcaaaatatatcacttcatttccctctactcaaatctcgccctatgcttacgacgatgtccaccgcgcgacctgtcaccctcctctcagctgttctcctcatataccctgcgacattattactcgggtctttgttttcagcaatctctccaacagcgcgacactccagagatttgtccgactctttcccacagcctgcaggccctctggctccatccctggcttcagacctatacctatccgacggccccgttaactacttcgcccgaaagaataatatcttcaatgtctacttcgtaaagattggatggctatggaccacagccgcctttgcctcgcttctcatattccaacccctttatgcttcgtctcaccgggaatccctctcacagcaagaagcacgtttccgacgcaccctccaagccattctacgatacacactcgcgacaacagtatggtatcttgcaacgcaatggttcttcgggccgccagtcattgatcgcagtttcgtggccacgggcggcaaatgcgaacaggctatcgaggaagtcgggaggatagccgctgggcagagtagcgcaacgggcctagacgcgctattcacagcaacgacgtgcaaagccgccggtggcgcatggaggggtggacatgatatcagtggacatgtgttgatgctggttctggccacaggagtcctggcatttgaggctgtcggggccagcgcatgcgcacccgcatgtttgtcgcgttctgatcctggggacgcgggacgtgaacgcaaggccagtgatgctgatagtactccaataatcgattcaattgagactgccgggttcgcaagaacgtggtcgctccgtcttgtttggggtattattgccatgggctggtggatgctcctcatgaccgcgatttggtttcacacttggctagaaagggtatgtgcattcttcggcaaaatcctacacgataaaattctaaatttgctaatgattcctctagtggtctggtctgttgattggtttgggagctgtgtatgccatctatattcttccaagacggatagcaccattggggaacgtaattggacatccgggagtatagacgtctgttttgcctgcgagattaaattctcagcagctgcgagtatatcgaatgataatgatagattgcattgattctgggcatcgagaaatgctcaagtcgtctaccgtcagacctgtattgtacatagagtaataagcctggcatatatatagacatagctagttacgaagtccttttcttcaaaatatcttcgatatccttctacatatccaccagaattctgacctaaggatggaaatgttgtagtactgctagggtgttggtgttggttcctttcccaggtatccagctcgaaatgctgggattgaggagcgtgtcaaaataccgaactcatcataggtgacaggtgacatttgagagatcatttgacttacctcctggaatcaatgctgccgcatacatcacccgcgtgataggcctcaagtcctctggtgtcagatcatcggttatggatagtttcatgtatggatcccaagcagcaatgatggcatcggagtagcacttcaaatcaccagagcattcttttttcgcattcacccgtggctggcattggatgcctatgcaggtcccaaactcacgaaaggccagccgaaatcggatattgcgctccaaatactgattgatttcgaacagattgtctgaaagaacccctagtcagcttgattcttattgtcatgtcctttcgtggatatcgacggaaagatgactgacatatttgatcgaagcatttccccgccaggtcagcagcccagctctctcgctcggaaaaccaatgtgccgtccataaagtcataccaagatccaggggatcacttgatacaaagtgctctccttttcgctccatcgtgcgtctgtagtcgtcgatctcctcggtcaacaccgcaccatcacctgcttctatggctgtatcttgcaggagtcggaaaataacaaagccatcaatcggatcaagattaccttctgacttgaccattggctctgacaagtccatgctcattttccatatcattcttggtcgagctgccgcgcgatcaacaaagaactttgggtgtatcgctttcgccagctctatggcttgtctgttgtacttcaaatctcccgatgctttggccatccggttcaatgcgaacatccaaaccgttaggtaatgatgatattgcccatcaccatctggaccgtgagcatctgtcttgccgatcctcaatccaccgcttagcgggttctcgtctgttgctcctcgcagtcttgagtggccatctcgatttctacctaggatgtcatggacagtctcaatcaaacgaccagccagcaccagataacggtcgtcaccaacaatgtcattgtcacttcgcttatactggctgtgcattgtgagaaagttgataaccccgaaggcatctgtccataggtatcgcccccgatgaccacctgatcttggtggtggagtccaggattttggatcttcgatgctgctaaaacttccgtaaagagattccatggcttgtccaaagcggtctatgcgcggtgacgggctgctgattggcagagccattctcgaggtatgggtatgtgccttcgaaatgggatgggcatatgcgtagctgcggggatgaataattgcttgtctagcagtgtgctgactggaaaagagcaacttgaaccactgcatttgttatcgattctcattctcagatgtcatttgttccactatcgccggaattagagcattttggttcgccatcgacgatgaagtcatgaagtcatgatgattgtttaacagccgggatgtgaataattcgctgggaaaaatcccgcaaaacaaagggcatatgttatattgatgaaagaagaatcgacatgcggtgggttatgtccggcatttcagtactcgacatattcatttattccgcgtaaagatatccccaaccacagcctaaccgttcatgcgcttggcatctatactccgaactacgaaaaggatgcctcaattacaagagcttttcaattcagcagtgcagcccctgcctgcaatcgaggataagagttttgcatcacacttcgatacctttgcgggtagccaagtgattctgctaggcgatggcagccatggaacatctgagttctattctgcacgtgcagagatcacaaagcgactcattgaacgacatggctacaccatggtcgcggtcgaagcagactggccagatgcagaggccatcgaccgatatgtgcgcttacgtccaggccccaaagcgcaaattggagggagcgcgaaaggatacgaagcattcactcgctttcctacctggatgtggaagaattatgagatgcaagggctagttgaatggatgcgtaatcgaaacaaggatctcccaccagaacaaagagccgggttctacgggttggacctgtacagcatgggtgcctcgatcgccgctgtgatcaactatttagaccaggtggacccacaggcaagcaagctagcacgccagcggtatgggtgcttggagccttgggtggatgatcccacttcatatggtctggcatcccttcagggattggaagactgcgaaggtccagtgatgaaaatactcacagaccttttggcccgaaggcttgagtacatcggcttgtgggatggcgatgaaaaccacagcgccgaacagaatgctcacctagttcgtgatgcggaacagtattacagggcgatgtactacagctcagcaagctcatggaacctgcgcgacatgcacatgttcgaaaccttagtccgcctgttaaagtacaacgagggagagaaagctattgtgtgggcccataattcgcatgtcggagatgcgcgctatacaagcatgggatttcgccgcaaggagctcaatatcgggcaactatgccgtgagcgactaggacgcgagaatgtgaccattcttggatgcggaacccacactggcacagttgccgcggcccatgagtgggacgatgatatggaggtcatgtccgtccgtccctcccgagaggatagttgggagattgtggcccatgatactggtgtgccacgattcgtgctcgacctgcgtcaggatcgcatagacccctctctgcgctcagctatcgctgctgagcaacgcctgcagcgcttcattggtgtcatctaccgccctgataccgagcgtgcctcccactactcgcaaaccttcctccacaagcagtttgatgcttatatctggtttgataggaccaaggctgttcaacccttggaagtaatgcagccccagacgccgcttggaaagagcgaaacctatccatttggactctagtactagtatatttctacctcaaaagcaacgagttattatcagtatctctcatttttctctcattgtagacggattaagttcttcctgcatataagtttcgcacttccggtgccgtttcctgcatatgcagcacaagtgcatgaatcacatcgcttagcacattgcaaagaccaggttcggagatttcccaaaaaggatgagaactgcaaaccttggaagtacgtacatacaaactttgtatagccgaaaacggacaaccgggccggatcaaatcaatcagatcaatcagataaggcggatcaaccataacgagtgggtcggtggatgtaaatcttgtgcttggtccctttaaaaaatccctgactggctctctcattggcctcaaggatcgcctgacctaccgacctcgggaatacatgctccatacaagaaacgaaatttcgatcatcggtggccagtacattttctgactagcttgtgtttagctcgtctccctagccaatctactccgtgctctaggtattttcccggtatggtgaaattttcgtttacacctactgtgctgcagtataaaaccggtgtcgaggaaactagcccccgaagccgtacgttttctttagttttcagactttgctgtcataagttcaggctcttcccatgactcaggatcccatttttcaaatttcaacggaggatttcaagtttgaaccgagattttaggtctgactgtcgaaaccatgggtgtgagaaagcgcttcgtcaacccatttgcacgcacggcatcctctgaggaggtacaaacgactgatgcccctgacctaaaggctcacgccgactccaaatttgccttggaaaacttggatcagaccgatcgggcctcgtcggacgtcgaagttgttgatcaaaaagcgcaggctggtactcagaaagcccaggcaagcacccaagcctggacaaagaacacattgattgcagcctatgttctgtaagttccatctggtgccgaccccccaaggaacttctttagctaacaaattaaagcgtctgggtcgtcaactttttagaatacttcagttctggactgctcagttccctatccccatatatctatagcggtttcgagctacactccttaacgggtctcacttctgtcatcgcttcgttgatctccgctctggtgaagttcccctacgcgaaacttatggatgtttggggtcgacctcaggcctttgcagtcggtgttggatctctgactctcggactagtcatgatggcagcctgcaagaatgtacaaacatattgtgctgctcaggtgttctaccagactgggttcagcatgatcgatttctctatgaccatcttcattgccgatactacggctttgaagaaccgggctttctggattgcttatgccgcttctccatatctcatcacgccttgggtctacggttacgctgcgaaccagatcgttgccccggacggcatcgggtatcgatggggctttggtatctttgccatcatcatgcccgttatcagtgctccgctctggggtctgtggtattatacccagaaaaaggccgaaaagatgaacttgacggagaagaagaacagtggacgaactctctggcagtccatcgtctactactgcattgagtttgatgttattggtctgcttatcatcgccacaggcttttctctcttcctgttgtcattcaacctatactcctatcaacgtggagaatggcattccccgatgatcatctgtttcgtggttattggcttttgtttgattatcgcgttcacgttctgggagagatactttgcgccagtgaagttcatgccctgggagctaatccaaaaccggactgtcttcttcaccttctccatggtggtatctctgtatttggcttggtacatctgggatagctacttctattccctcttgcaggtgatgttcaaccaaaccgtcacgcaagcaacctatatctccaacatttacaccatgggctcgtgcttctggtgccttgtcttcggagccatccttcgctaccagggccgcctgaagtggtgggccatctgcttcggtgttcctcttaccatccttggggttggcctcatgatcaaattccgccaacccgattcgaacattggatacatcgtgatgtgccagatcttcgttgcattcggtggtggcaccctcgtcatctgcgagcagatgactgtcatggctgtttcttcccagagaaacattccggctattttggctatcgagggtgtcgttgctagtatcggtagcgccctcggaggtactgtcgctgtcgctatgtggactggtattttccctgtcaagttaaaggagctcctcccggcttctgcacaggcgaacttgactaccatttacggctccttggttgtccagcagtcctacgccaaaggcacagctactcgcgatgctattgaccatgcgtatggtgagacccagcgactcatgctcattaccgctacttgtctttatattataacgtggacttcatgcttcttctggaaggatctcaatgtcaagaagatgaaacagcaggtgcatggtgttcacctgtgaatggtgtgtgcgccatgttagccgtgtaactacggcgcggtatagcagcacattggacaacaggaattcattggctaagcatatttatgtcgttgactctcctctcttcgtatacttcattagagatataatatcaagaatcttgtattttcctcggtactagtgacctggcaaagatttatttataaggctcaattgttgcgaatagagtcaggagatgcaaacatttatgtgttctatagtggttctcgaaattggcttgacgcacactgtaactctttttctgccaaggccttaaatttgtagggctaatttacactggtgacagcattgatgctattgacattgtggtcaaacctgttgtcatctggatctttccagaaaagttctagatcattttcatccgcctcttcattcacaatcctgccatttggaatacgaggatcaacgccttgaaaaatctttagtcctggtaatttagcatctttctcacgtgccagctgctcaatttgggcattgacatctagatcagattgggagactttgagtcaagctgcttcttgccatctcctgcacctcgagctagatagcatagcgtatgggcttcaatactgagatgcttgagctgcgaaaagtctttcagggagacgcgtacgggtgcgatttctagggcgactagctcctgcagctcgtctgcccattgctcctcataaccttttcggtcgtcttcggtcatcctatcttcttgacaggattgatattcctcatcatatgattcttgccgagatgtctcgctctccatatccaaattcaattcgtctaaagtctggcggtgtgtccaaagggacttgaatatcggagtcacgtataacgaggggttgccaccctcagggtataaacgaccaccgatagtggaagtaaaacttttcaaggccttggcggattcgatgatacggcaaagatcccagctttccattatagaatgtgtaaagctgatcttgctatagttggcggaacggggaggtggtattccggcttcattgctccacgttaccagcttaaaagcgaccgattcaatagccggtagtttacggaccatatcaagccgatgataatatgggtcttcaacgtactcattgaattcgttaagcttatcgtctgggtggaagttaatatttcgtagattttggcagtaagataccgattctgtggacgtagaggcctgatatagtaatgtttggagaagattcaccctttcatgattcctagcagatgaaaatcaaatgtattccagtaatggatacattgaaatgaattcaagattcggggcagctgcaactaagagcgtaatcagggcatctttaaactgaagttcttccgtgcttgaatcagatctatattactagtaagcaacaagcgtagcactccctgggatattctttgatagagataaaagctactggaattcagcaaggtttcgtgaaagcatagataaaattgactcgcgctcctgtgcatcttggaagccggcgcctaggattgcttgcttgagcctgtcgatgtccttaggggaaagtatagaatctcgaatggaattcttggattcaggatcaaatcaatcattccagttccgtacaggtccacacgccgaagataatctccaaggagggcagttcgtaagatggcaagtaatgtgtctggtccagcttggagtacagcttcatgggtctgcgggtacttctctcggccgaacttcaatcgatgatatttctcgcgatttttcagatcacatagagcatgtattccacggctttgttgtggcaaggccatgacgttgtataccaaaagattgttgatcacattgagcagcaattcatcgggaaaattctgcagggacggcatttttgcccgtatagcgacattgcgtcgaatcaaggcctcgggaaagcacagaattcggaacatgtgggcgtcagttgaaggaaagcagattcactacgatgtcggtcgatcaatgggcccaggcaccaaccaggcacaacccgagtcacaggtggcagtaaacgggtcgtgcgtaggctttgttgcacgtgacgccaagaccgaccacgatgagcgagcggcttaaaacagcgtcaaaagtggccgtttctggcatcccattcaccgtgtcatcctcaatgttaccttgttgttgtaggactatgtattcgatggtcataaaccatagttcccacaaaaggtgttattcaatatataacatgcgatatttggagtattacgatagacaaatctccgatagaactatagatgtaataattttctaggtaaaaacctaaccaaggcgactgcgtatcaatgattatggcgcagtggctggccttcttgagctagtcgctgatatttgactgcctttcgcagaaccataccatggctcagttgatcagtttcctggcggaagatctcctgccacggagtaccactagggacaatggggtatcccttggtacccaatgctttccttcgttgttcgatctcatcatcggtaatgagcatatcaacccgccgtttgcgcaagtcaattcgaagcctgtccccatctttcaaaatagcaagattgcctccagctgcggcctcgggactagcattcaaaatagaaggtgacccagatgttcccgattgtctaccatccccgatgcagaaaagtccatcgataccctctttcaagagtcgggctggcggatgcatattgacgacctccgctgctccaggatatccgattgggccaacaccgcgcataacgaggatggtcttctcgtcgatgtatggcgtattctccaggcgatgttcgtaatcttcgggtccatcaaacaccacaacagacccttcaaatgcctccaggtcatcggggttggagaggtatcgcttccggaatgcgggtgaaatgacacatgtcttcatgattgcagagtcgaagaggttacccttcaagtgagcgaatccggcatctttcatcaatggatcgtcatatggtttaatgacacgccgatcccatgtatgcttcccacggacattctcggcaatggttttgccattgcaagtgagcacatcgccgttcagctttccctggtctaatagctcagccatgatagccggcaggcctccagcgcggtaatattcttcaccgagatattcacccgaaggctgcatattcaacaacagcgggatggtagatccgatggtatcccaatcatccatggacacctctacgcctgtgtgctgcgcgatggcgttgatgtgaataggagcattcgtgctgccgccgattgcggcgtttgctacaatggcattctcgaaggcttcgcgtgtcatgatatcacaaggcttccggtctgcctctaccatttccacgatccgtttgccagtttcgtaggcacactgagctctgtgacggtaggcagcggggatggcggctgacccggggagggccattcccaaggactctgcgagagcattcatcgtcgaggcagttcccattgtgttgcagtggccaactgatggagttctgagtttgagttagattccggtgtcatcaatcggggttttggagatggcataccctcgggcaatgtaatccataaactcattttcgtcaatgtcacccgtcgcgtaaagctctcgcccatgccacaatacagtgcctgctccggtcaaagcctccttggagtaaccattgagcataggtcccacgttcatgcagatagcagggatattctagaaacatcagcatagatctaggaatccctcgagtctgatacccaccattgtagccgcagccatcaaacaagccggggttgtcttgtcacaaccagtaagcaacacaacaccatcaaggaaataccccgtcaagatctccaccaagccaagatacgccaggttacgatcaagggtagcagtgggccgtctcgaggtctcctggataggatgtgtgggaaactcaaatggaatacctccagcagtccgaataccttcacgaacacgcttggatagctcaatatgatggcgattgcaaggtgcaatatccgagcccgtctgagcaattccaatcatcggcttaccagacatgagttcttctttggtgataccgtagttgaagtaccgctccatgtagacagctgtcatgccggggttggtgcggcagtcgaaccatgcggacgaacgaagtgttcgtccaggttgtttgacggggacttgagcattgtctgcctggcttttgactcccatgcgcatttctagttcctggttgcgtcgtcgcagggcctgcaactcactcagacagtcctcgatgttgattgcttgaggttgagcgtcattgctgcatgaacagccttcacaggacttcttgtcagaacacgccatgatgttatagatgcactatcgattgaggtaatgttataaaacatttcgatgtgaggggagacaatggattatatatggcaggcttcccatttgtgcttccttgaaaaatgcggagtacagtcgggagacactttccgagacatttgacgtcgaatcattggaatcgtactcgggacaatttgttgaaatgccccgcgtgatcacggagatgagccgagattttgcctctcgggatgtgactacccggatattggtctcttagatatatgatgttaattttccattgatgtaatttccaataactctctgcatcaatttatcgacaatgcaaggtctaaaccatgtaaagacagtgctcgacaatggcggcctcgctctgggagtgtggcagctattgcccggcagcaacatgtcgcgcactctagcacgagctggatacgattgggttttggtggactgtgaacatggaaatatcgatggctagtgtttttgtcattattcgaaagctcatgctaacattcccacagacgccgcaatgcacgaagctgtccccgccatagtatcatatggagtgagcccgattgttcgcgttccggatttccaatcttggatgattaaacgtatgttaaacagagtatatcgctagcccacttgacaatctcttatcctttgtataggggctttggatgcaggcgcacacggagtcctcgctcctcttgtacgaacagtggaagacacaaaggccttcgtcgaggcctgccgattcccaccacaggggaaacgaggcttcgggtcgcctttcccgatggacaggtttggtaggaatgtatcagccacccagtacctgactgaggccaatgccaatcttctgctctcagtccagattgagacgagagaggcttttgacaatgtcgattccatcgccgccgttgaagggcttgatctattgtttgtcggaccttttgacctggcaaatggtatcggccaccccgtactaggtagtacatttgcgcctgagttggaacaagccattgagaaggttctgtcttcggcgcacaaggcaggcaagaaggctggaatctactgtggaaatggaaagcaggcaaagaaatatgccgacttggggtatgactttgtcaatgttgtaactgacgttggtgctctgactagctcgctcgcaagtgagatggagattgtcactcaaaaagcaggcaggactgcctctgggccttacggtagctagtgcatcctatatactattgaaacgaattttgttggtctcgctcttcttgatcgcgtaagtcatgaaggacatccatagatgcaccgtcgcgagaatacagtcattcataccagagcattccagaacgaattcgactctacatcaacctgaaagccttgggcaattgcctcaaggtccagatccgataattccaaactcatctgaaaagatccaaattcaagtggacgatctgcgacgccggattctctggcaacattaatagactcgggcatgaccatgtgctcgctgggaaagttgttccctgcgcttccagcgcgttgattgtcgtctgcaacattgattcctaagtgagaaatcaacttatccaaattctccctggccttttctgctgcagaatagaggcgtgtgtgttcaataagaatatttcggcaaaaaaccagtgattggaacatggttgagttactccctttctgggccacaattcgtgcgtggatcgttgcactgatatacgtagcatatgagagcatgtatggtgcactgctcaaagagaaatgctgcgagtagtcatggagaatctgaacaatttggttcgcagctgcggtacatgcattcaccgactcgtgggcagttgttgaattgatgaccccgtcgtggccggttattaaaggacgatggagcaaaataataagcacattgaatagagctcttggcaaaaattagtagctatcaattagtcctggttggtgaaaagaacatacaaaagacaggcagactgaggaaggagaaccgcctggtctgggaatgacagatagtcaagccgacgaggcaaattttcgcgccagtttctcagctgtgacttgatttcccttgagatatttgctcggtgaaccagatttgactctcgagattctgaataaatctctcggagaatacgttccacaatcgttgtcaactcgcataaattagtgagtaaagaaacattaagcgatggaaccactactcgaggctttgtggtcatgtatgtgataccctgaaagggttcaagctcgtcaaagtcatccagaaagtccagtgacgcgctcacattgacacggttgagaaggggaggtctcccttggaaaagacactggatcttatcaataactagttatcagaagttagagacgactcgtaagacaatacccagtgcagaaaagtgatagctcacagtatgctccccagagaactcgctttcgaatttcaagttcttcggcagggatactatccacagcaggaagcacatgcagaccaagatcaatgaacatattgaaggcatttccagcgtagagccatgacagactcctttcatcacatctggaaaaaagcgcattagacataatcaataatgcctgaagggtagtgatttcgcttttatcaaagcaatctcgcaaaagctgcgtgaagcgttgccggaacttccatcctgcagtcgtaatgtcatttggatcggaacgaagctctggtcggtcgcagtgcttcgacactacaaaaaatatcgcattcaacagcaatttagagaagtacggcccctcgcaggccatatctcgcatgaaagccggccggtaaattatctgtgctgtgtaaagctgacgactccaatatatggagagtagatgcatgccaatatcaggatcgataccatcaaaatcgagtcttccggcagcaagattgagtggctcaagctgtcctgttctttccaaattagtatcataaccatatctggtattgcagaaggtgcgacttgctctgcctcgctgtctgggaaaagagaaaatgccttgttccctcttcgttggatggacctagtctattctgctcattatagttcggactggtatcatcatacaccgtacttgttggcccatgatacaatgatgtgtttctgcggtcgttctccggtatttctgggtgtgatgcatctctagttggaacggagggagagtcattccgcgagagaccaatacctgttactctcgagaatggcaatggggtatgtggagtgctttccgatgtaacagaatgctccgggtccgatagaaccctttcggcagaagtgctagtttggaattgggcacatttctgtcgaaggatttcattctcctcctctaattccacaatgcgatggatggtcggcccaaaagcgaagtatcagcaacttgaaatttggtcgtaagagtctcatttgtacctcgggttattctgggccacgcatagccgacaatcgaggctcttggctagacagttcccacactggggccgctggccatcacacttcaactacttgtttgatccaataataagttcgaatcccatgtagaggccaagaatacgcacctttttatggcgacaacgcacacacgctacggctactctctttcgaatttgcattgtgcttcatgaggtcggaaaactatccgagatttgcttcacctgggcattccattggatgacgtcagccgtagcattacttacataaatagtagccttgtttatcaggcaccataaagcatatctctgcgttcttcttggcgggcggtattagctatagagtaaataatacaggtgagtaacgttttcaagcttaatgcttaaattattaaggatcaaaaagccgctataaaggctacacgcgctaaccggataaaaaaagctttgcaagcgccgcgctcaatgcaaaccataaaaaactccaatgaatgcaccagctccatgaacttcaaacaaacagctgaaggcaaggaccgaatatcaagaccggagtagacctcaggcaacagcgtcgaccccctgccaacaaaagggaactctaccaaccaggaataccagacttgcatctaatagcctcaccacaagagccttcaatttccactaccagacatagccgcatcctcagcgacacctccggatccatcaaccgctccacccgtcgcagcgaccacgcgatcaacctcgctgcggcattcgggcatagcgctgcgcatctcgcgggccagcacgtcacggaagctcgcaaaggcctcgcgcttcccgcgcaggtcctgattaccacgttgcacaagctcgatgaactctcgcgtgtagatatccggattgcgcgccgagtcgacgtagtcgattatctctggtgggagctggatgctggcgagggaggggttagaaggatcggtgttggtgtctggttgggtttcttgtgttggcgaaagttgtgtgtgtgttgacagggtcgaaagggcgagtgttagatttttgctggagtgtattagttttggttggttagggttggggtttagtgatgttgcttgtcgggaagtgtttcgttctgacggggcacatttataggcacaatgaatggagagtgcataggatgctattgcagttgacgtacatctttcgcacaagctcttgctgtgtctctgggcccagatagccgtggacggcggattgtatctcgaataagtgctggatcacatctttgaggtcgtctgtgtgaggagttagcatgtgcactctcagagctacctagtgctcgtaactcaccatcgaccgttttcaaagtcactggcgccataatataatagattgaaagaggtctcggttcacaaactcaagatgaggtttctcttgctattgcggggagaaacaaaggcggtgtgggggatacttgatcccatctacgattacagaaaacaaaggaaactactaactaactagtgttttcggagacaaatttttaaaaagaacttatgtagtttccaatatgtcactatctatatatgcatagctcgtgggaaccgatctcattccccgagttgcgtccgcacggcgaacacacgctgaaaccgcatcaagtgaaacaaacaagaattgtaacctatgctctacacttcccgtgtcctcaagctagaaagattcggaattttgatctctgtctccatttcaagcccggacaagcttgggaaccgttggctgaatttggcctcccagtcctctcctgtagggcttgccggagtctcttgggaggaactatggccagtacccggtcgcgaggtggctgcgccagcgcgcaaattcttgggtttaggtggtgcagctggtcgatttgcgggacgttgcgcggatgggtgactggtaggggtgacagattgcgggagacttgcggagatattaggtccatctcggcgatctgggagggccgtcgaactctcacgaggagtgtaggtcgaacttgatgtgtgagaagcgagcagctggctagaggtgacggatctggcctcactctgctttgccggcaaagaagaggaagtctccgtgaaccgtccatatccagtagcagtctttggaatggtcggtttttcagactctccgagcaacgactgtaccttgctctgaattgcgcgggagcgtgcaccatcgcctatcactctgccacccccgtcacccgtttcggcaacccgacgccggtactcagctgcggcattggcaacgcgtttctcctcttgagagagtcggcggcgttccagctcccggcgcatctctggtgatatgtcgtccctgtccgcgtcttccaaggcaaactcgtcattcggcgaaagaccatcgtcggctgaatcccaagtcccaatcagaccctgccgaggcgcatcctctggcgatgatgatgcggatttgtcttggttgcccgcttcgaatcggcggaatgcgtcgccgaatcgaccggcaaataggtttttccctccagaaagcgacaacgtagacagactagcgcgtttgttgtgtttgtggctattactagagcgtttctcacgcttccgattgctctcttcttcttccatcgcgcgtaggtaatcgatgtcagaggaaataatccgatcagactcacgatccacatccgtacgcactgaccgcagtggcgcgccaccatcgtattgtaggcgggaaatatccagcgaagcccgcgggctatcagagtcacgcggctggtcatacctggctcccggctggacggacattggccgagcctttccgatagccgatttagaacgtcccacaggatcatttacctctaatgctgaaggccgtctcaaggtttccatcgaggggcgggcggagttagactggctgggtatgcggtcagatggcagccgcgagcttccttccacattcaaactcggcatcgggggggacggcgctttgtgcgggcgtgtcactctttgttcctgctcggttgtaaatggctcgctggaagatcggggttcattatcagacgaagggaatcgataaattgggcgactcagcggatttggctccggcaaacgaggtgtttggatgggtgaggtcatggtacctgtcgacaccatcatgggccgctgaggggttggctggtacaagggaatagcctgcggcgcaggcatttcacgcaaatccggtgctctgacaggagatgtctgggatagtcgcttactgaccggcttcggagcacgttcgggcgagacacgtcgggcaaaagcatcatcggctagggcgttggtaagtcttcgagatagatcctcgtcctcgggtttggattctactgttggctcgaattcaaacttgtcccctttttcatgcaaaaggtcaaactggtccaaggaggggaatcgtttagacatttcctctgccgtcttctttcgggatgcgctcccatccagggctgcaaatggatcatttgatgaaccttcagcagcggctagatagggcgcaggactcggtctctcggagccgagttgagacgacggggatttgccaggtcggccacgccgcataggtgcaatttctgggattatctcggtctcctgcatcggaggcgaaaatactgcgccgaccgcgggtgtttccgtgggcgtgggcggtagctcttgatatttgcgtgcctccgaaacagagcgcttggaatagatcttcgtgacagtcagtatcaagttttcactaaaaaaagacatgggccgacatacgtctttgataggaacttccttcccttgcattttgcacacctcgcgcacgacctcgtatatgttgggacgattgcgaggatcttccttcaacatcgagcctgtgcgcagctgtcagccattgatgatcgattataaattaaatcaaagtcttaaacttaccaatgaacagctttagccgactcgaaaagggaggataggaagggtatttgaaggtcgcgttgagaatagccatctgaccgacctcttcgaagggggttgtgtagtagcataatttgtacaaaaacacaccaagtgcccatatatcactcttctcgtcaatcggttgctttcggtagacgtcaatcatttctgggcttcggtactgcagggttgtatgccgctgcacatcatcttcgatcaagcgaccctcagcggcggaagtagcagcaggacgagggggtgctgatgatccaaaatcacacagtttgtaagtgggggaactccccttgcccgagatcagaacgttctcaactttcagatcacgatggaggaggggcggtttgagataatgcatgcacgcaacaccttcagcaacatcggagaatatcttcacgatctccggctctgtcaaccggtgttggagccgggtgttcatgaagtcgataagaccaccgcccgcgcagtactccatgatcagaaacacctcatatccacctccgcgcagctgcgaggcatgcgaatcaatatacttcacaatgtgccggtggcccttgagcttcttcatggtttccacttcagtgcgcatgttggcaagggccgccttgtcaggcacggccactcgcttcagcactgcggtttcggacccattgactggctgaggcaatcgcaccacgtagacatgagcaaaaccaccctcagagagatacttctccactaccacgcgatggttgccaacttgaatcttagtgcccggaagcaaggtccccgcaggtgctgccgctacggcgacgggattgtagacggggaattgacgtgacgtcgcgggatgaccgtgggtaggttgtgaggacatggtgccggggtgcccttcaagggcaggtcgtaaagcggttctcggtggctagcgacgcggcatagagagtgagacggagattgagggggattcgaggttggcggagataggtgcctgcgagaggactaaaaggacaggttggcgaagaggcggagaggcggagaggcgcagacacggggtagtacctgactaccagactattacagggggatgacaagaatatttgaagctgagatgggataaaaagaaaacgatcaacactcagatggagagagaggaggtattggaatctcaagtggaaggccacccaatcaccggctgcggatcacgttatgccgagtcttgtccctcaccatcggggttgttttccaccttcacttctcctaaatgatgactttcaatgtgtcttcccactggcagactaatagttatccagtgtttagcatgaccgaagtgggccaggatgaatcttaattgcctctcataggaccctatgtcctcttctccctggtcatggtcctacacctcatgtcccggtcatgggacgtctactccgtatattgatacggcgctctcgcaaccgtggatggtgaccgtgagatccacgacatagctgctttcctccttttttttctttttttttttatgaatcaggagccccaacatgggagtcacattttaccgcactctccaccctactatcagctctaatccagtgaacaagcctcggtggctacatcctccaagtcgaataccttggacccactacgctcaaattatctcccccaaccgcttgaccgcaagattaacaagtgttttcagcgctccgccccaagcgctatatgctcggcgaagacacttgaaatacatacttggaccgaatattcttcgcgctggtccgcggctcgaggtacacaggcattaactgcaaccgctcgtgaaaacaacctacatgacgctcgcatgcttggacttttaacaaacaatgtcaacatccggagcaccccgggcttctaataacgtgccgggaagaggctcaagcggccaatacgaatacctcttgatcacagagaagggcgctaactgcgaaattgacgtaggatgtatgatatagcagcatgcgagatactatacatctttggacctgggttataagcctctaactggttttttttgcttctattccccacctaataataacccttcctccatatctcaacagtgcaagaaagcggagagcaaggcggtcggaatcatggaggaacgatattccgagcggtaaatttcccaaaatagtaagataaaaacaaaacagtcgtacttttgcgatgttgacaggactctgagcattgatgcctgtgcaggtcgaaaggctttttcaaaagccccttaattgagaacaagcactatgtagtcatagctttgaacaatttcattgctataactagtcaaaaagctcactgtaattgttcctgtaattccatcccttagctcggtatagccacgtagaatcgcgtggcctccggggaattctacataattcgggtaatagatgggagcagataagaattgaggtctttttctagtgcgtttgctcatttgtattgtcaaatttgtttttgatgtgatggccacgtcgagtgatctggaagcgttggcgccgatccttagctcccacacttgtcttccaaacaaaaacccccccgtgtcagacttaggtactcccgcgcttccaggtttttgctttgagatttggattttgtttggatttttgagcttagttgtgtgctttttcttggatttggcatctgagtaccctccacagcactgagcgcctggggcctcagtgcaacacttgtcagactaatatgacctggcagttgactctcgaccgcgagcacttgtccatctaggattgatccggtggatcaacccaggttatagctagtcgttcgatcgacgctgcacttcgctgcactgcggcgcatctatatatatatatatatacactgtcgtcgctccaggctgatccaacatggacggtccaccaccgccgccgccgcctcatggagaaaatccccatacgactgaaggagaatatcgcaaatcctcagacctgccagatggcaactacgacatttttatcatcccacctcactccgctggctcgggcttcctctaccttccttccctgcagtgcaaccgaaacagtttcctagctggcgtcgcaagcaccctcctcgcatgttttgtatggtcgtacctctccccgattgtgaaggcttggtatctagccacggtcactaacggcaatggtacgggtatggcggtacttgggatcggggtgggtgtcgctggatggctttttggctccactcagtccagtagctcgggagataaaggcaatggcggcgcacgtggtgggcggttcggatttggtggctttggtcgtggttctgggggctcgggtggctctaggaacgccggtccaaacaccaaccaacagtcgtcgggtgccaattacggcggcaacggggcgggtcagcaaagacaacagggaggaaactttggtggaggacaaacccacggcaaccaatattccggtaatcaatatggctctggttctcctccaaagtctgataataacaaacgtgaaaaggaggaggctgaaaagcgcgctaatgaggaacgtgctaaggaggagcgagctaaacaagagcgagccagagaggagcgtgctcgggaagaacatgctagagcagagcgcgttagagaagaacgagctaagcaagagcgagccaaagcggaacgtgctaaggaggagcgtgctaaagaagaacgcgtcaaggaagagcgtgctagagaggaacgggctagggaacgagccaaagaagaagccgaacgggagcgagcaaaagaagaaacgagacgcaaagaggagctacgccgaaagatggaggatttcaagcgcaagcgtgaggcagatgccaaagaaaaagagaaaaagcgcgagcgcgaagcaatggagaaagaattacaggaacggcgcgagcagctcgaaaaggagatggctgctgctagggccgctgtagagaaggaggcacgcgagcaactggagaaggaagccgcagagtcccgcgagagacaggcaaaggccgaagctgaggcgaaggctcaactcgaaaagttggaagcagaagctaaagaggcggccgctaaagaagctgctgagcaaaaggctgccgcaaaggccgccgctcagaaagaagctatagccaaatttgcggcgctcaaggaagcagcaagcaagaaatacgctgagaagaaggcgcaagacgcaaagaaagaggccgctgccaaactcaagtcagctagtactagcaatgtgcctcgcacactttctcccaagaaaccagcaccccacccaaccaccaaacctgccaacgatgacgatgcgtactcctttcgtccctacgaccgaccacggcggccatatgcggctggctcagtatactccgagtcttcttatacaccttctcactcgactgcgcgcacaacacctcccccctcacatcgcagtacatattccaccaaggatccagacaagattgtgatccaaggtgtatacgccttcaataatgcctttatgaagaccccagtggcgcaacttgtctcaggccaaggtatgatcaccgatgggctggtgctgcgcatcacaaccgaaggtctcttcatcgacgatgacctacgcggcatcggccagcgtgagtgggacgtcaaagcatggaccatcaagctggcggaggtgtggtgtccacagttaaactctgctccatccgccaaaaacgcgtccggcaaccctttctctttccgtcgtgggaacaacgttcccaccagcgaagaatcagaggccttcctcggccacttgcttaaagtatgcaaaaatacttgccgcctagcttcgcgcagtgctactgccagccatgatggtggccctgtccacccgccccaggggtctcgttgtctgcacattctccgcgccagtgttcgtgaccaagaaggcaagaagtatgtctttgtgctgcaggatactgaggcctggaaggtcgctatcggtctccagcggctccgggctggagctctggtccgctcgctgggtgtgtgctctctgccggtccctgattgcaaaactatgctcggtgctctcggttatgtttgattgaaaccttgttatgccagcgttcttgttacctttcttgcattttatttatatcccaccatttatctctatatgcccttcttgtgttcgattcgacttgaacgtcatcactcattagcggcggagtttgcttgatgctcttctgtccagtatatccattcgttactcttgtcttcttcaacccattatcttttgagattcccctggtttatctgttttatgtttattattacggtttttcaacatgagggaaagtatatatcacaaacgttacgacagcttacatatattgtttattatgcatagttacatggcatgcccaacccttattctgtatgatggttcctcaaacttgatgtcatcgaccatgtatggtgatcaatgtagcattgtcataataggtaaagagaacctcacgagccctagagggctgcatgtaactagaaagtagaagagaatgaatcatatctgagaaatctttgttttatgagtgtcatgcaggtatatacgccgcatattcttctacttgactatgtaaagagtgacaacctcaccaagtgtatcgagagccgaaagatgcgaagcaaatctttatgtcaaagtccacattggagtaaaccccagagcaataaaaaaaatagacgaacgccgaaaatggttgatcggatgtagagcttgtagatattccgtacacattgatttcacgtccatagatgtactgctctcgtagatccattccagattgcagcactcatatacaaattatccgaagggggccacaatggggaaagaaaacattagaccgaagggaaaaaaaaaaacaatatcaaatctatcagatcgggaatcatatggcgtctccgcggaaacaaaaaaatcgtgatatggcgggcagtgggcaaaaaagtgaaaccccagtatccaacagagcaatgtgtgagatatcgaggtgcaactccaactccggtcgaagacatgcaattcctgttttgagtttggtcatcttgagacaaaagatgaaagaatcggtcgtggtatcgggtgaataggatgagttcgatggcatcatctagaatgaaaagccgccgtggccaccaaaggagccgccgccgttcatcatgtttcgaagaacatcgggatcgatgtggtgaacgccgccaccgaagccgccgaaacctccaccaccggggaaaccaccgccgccatacatgtcagctgggtccctcagatcgtctccgttatcgaaagcagcacgtttcctaatgaggttagcattgtgtcgaatggggttgaaagttgtggcggacttactgaggatcaatcaaattctcataggcttcaccaatttccttgaacttctcatcgccggctgcaccgtcacggttcttatctgggtggtatagaatagccaacttgcggtaggccttcttgatttcctgttcgctggcatcactctcgactcccaaaatcttatagtagtctttgcgttgagacttcttcagctcgaattcagcttcgcggatctcctccgcaatgccgctctcgccggggttgttctcagcaacgctcttatagtcacgaatagcctcctcccagttaccggccttgccctgggccttggcacggtacttcatagccttcgtatacccggggtcgagacggagcgcttcggtacagtcctgaatggcagaatcatactccttcaagttgatataagcctgggcacggttacccagaatcttggcattcatatccttgttggaggggtcaacctcgagagcctgtgcccaaagatcgatagcacggcgatagtccctggccttgtaagcggtgtttccttcctcttttgtgcgagacaacttctgcacaatgcgcagtagcttgatggcctgcttcatgtccgggtccagcccgaggcacatcttcagaaccttctgtgcctgctcggtttcaccgagggcatagaaggcgcgggcacggatcatcatcgcatccgggtcctggctgttctcgcgcagcaagttgattgcaatgtcctgtgctctgcctagcgagttgatgttgttcagcctcagatgggcctcggcggccataagcgtccacttgcggggctcccggacaccttgtccgagcccttggcgtgcctggtctagacagtagatcaccatcgacacaccgcggtcttccgctattgtccgctcggcttgcgtgacgaagcgtaacatcttctctgcggctgcccggtcggtggcagtggctggtggctggatacgtgacagcacctctagggcctctgcaggacgacccaaattcgtcagaatcttagcccatcggtgcatgatcttcgggttgccatgatcgagctcgctggcacgttgaacatcctgcaacgcattcgggaattgtttagcggacatgtaggccgccgctcggttagagagatagactggtgagttgggattgatctcgatggctgcagtacaagaaaatcatcagcgaccccgctcattcaaggctaagtcatgagacacggtgtccctgtgggatagagaaaatgcatacccttgttgtattcatcgatagctcgtcgataattgccatccttgaagaacttgtttccggccaacttgaaggagtcggcctcgtcggcagaagatatattcgactggtgcggtggcggagtcggactccgctcctcagtttccttcacggcatctttcttcacagcatcggtcttcgccgtctcagtcttcaccgcatcagtcttcaccgcatcaatcttcgcagcatcagtcttcagggcatcattcttgacatcatccttcacagcatcaatctggggttccttgggatcaatatccatgaaattctgctgctcttcgttggatgctgccatggcggacaatcgacgacgtagctcgtcaggtgggagattgagtggatgtatgtcctggtcacgcgaagaccgggcaaacttgaaattggcggtcggtccggaattggaggatgaccgactgagagaaaagtatgattgtttggcaggtttgggagatttggtgggggacgatgatttggagggagatttggtaggtggcttggttggggatttggagggcgacttcggagatggagatgtgcgcgaagcggagaaggaagatcgagacggacgtagatcaggtttgttcttctcggtcttatccttatccttgtcctttttgaagatgtgggcgagttggaccattgggggtggggagggagtttttttttttttctatcgaaggcggtagaatcggggagattcccacggtgtgaaccacggatggggggaagaggaatatcaacttgggacttttttgcaactttgcaacttcaatttgcactcgggaatcttttgattcaagtctgagccatgccttgtctctcactctctgattcctgtcatgttaatctcagaaaataataagaaggttggtggttggactgggtttggtaacctggatgcttgatgccggggtgaaaaccagaccgagaaatcagttgggcctgtcctcttataatatatatattttttttttcttattctatcatatgttccatctttgctactggctggcaaataatccagaggctggagagctcctggtctgtgttagcgcgcaaaagaactggagcaatggagtcactcatttctggccgggattgatgcccagccgcgagggggaagggaaaaaaacagctcgaagagattcgagaatcttccgtcttcttattatcgtcttaagtctatcaccccctcaacggaacctgcaggggtggttggcgaggctgtcaatgactcgcggtggagcggtggatccaatgtgcaggttgctagtttctacgctgacgggtgacaggtatacagcagtaccgttactggcgtttcagagagtgggacccctgtgtcgggctctttgctgcgagattattcgcactaataatcttgtcggaaccggctctccatgccgggatacacttaacgtatcgagtgtaagtcttggctccattaggactcgtctgatatacatatgatatacatatgatatacatggtactaatgtctcttaggggcgaaaccaaggtgaaacaccggtcttacagcgtcataataagtctgatttacaaaaagaagccaaaaaaataggagcaaagcgaagcaagttgaagagtgagtattataatgctagtctgctcaatggatttagaatagctgtaaatagcgtcaagggaatatgtacagagagaaatataagagagagtatagcagggagtatagcagcagaatgataagttcctttgctgactttagggctatttcaccgaggtatctagctaccacgctgttgttcttatgtacccagttcctcgcggggctcccgcagcaatcatttcgttttttatacggcaaaccttgcaaaagatcgtttacgttacgtatgagcggaccaatattgagggtagtctctcctagatcaaaatgagtttgatattgcttagtttgatagtggagatggcacattgaccccctgttccgttcccggtagcgcatttccgccagcgttgaactcaaagccaatattaagaggaaccaataacaggcgagcttgttaagggctgacggggtacccctcttcggggatataacagtgagcaaaaagacaaccccaataaatgctcgatcaatcttttttcaagcggccttttatactcttagaacaggcgagaggaaacaatactacagctatataatttgaaatcaccataaccactgagccactgaaagaaagcagccaaccaagagtcagacctgagatgaaaccagaggtgttaccgcccctttcctttgtctattagcggtactcgggttcttatacagagaactgtttcaagggaagtctaaatgtatcgctcaatacctatctatttggcattattgtcgtcgttcacagatgagcgagtgagcttccggaatcaatatcaaagacgtcataacgctaagcggtaatcacgctgctcatgcccaattccgcctctcctcatgcattctttgggcaattcggacccagctggaaacccgatcatctcctagagctgcgtcgtatgtttgaataaatccgtgttcgtcatatggcggaggctggaccagcagatcctcccgacgaaggcgattattgtaatcgatgtgctcatcaaaacgttgaaacacgtcgcgccatggtctaaccggcgaaattggtgagactggcgaagacgctgtatcatcttgaggctgagcatcatatgcaccatgcacatatatctctccaacaatccatttcttctcatgttcgagccaagtgatcgggacacagctccgtgatcgtgggggagaatgtggaatgtgctgtatacgtgggcgcacctcgtattcgtggttgaggaacagttcgtccggcggaccaattggacgtccacgggcttcggcccatcttagattcgcatcgattggggagcggttcggtgaccggttctgtcgtgtgttacgatgctgtgttggcgaggtagcgcccgttgaagaaggtctcggtggcagaggttttgagaacaaatattgaatagaagcacttgaatttgcttgaacacgaggggtcgttgtatctggctgaacaatgaattttggattaaccattgccgcaccccccagggatgagagatccatgataggacagtcgagatcggagcctttgagaggctcggaagctcgtcgcttaggtagacagaaaagcgcgattaaatagggggcgcgatgagtagatcatatatcatatggcttgatatactactatctttagatagtaatatatgtacgctttgggggcgttcaagagtggaccatcacggagggctcgtatctagataatacaagggaagttgggctaaaaggctccttcttagggttgatgcatttactattctctggagaagggaatataacacatactacggagtatgcagggtatacacggaagatagatccttaggcagtgcagtggcaagaatgctcttagggccaacaaaacaccgacgatcgttcatttctctgtacattgcgtatcctaaagtcatagccgaaaatcaattgcccgaatacgaaattgtgccgttccttttcaggataatgatccttacaatttggggtccaaattcacccagggggctgtgcattgttttctcatcctcactgcaatggcgttaactcaccagatatattcgggcttcagtgcgccttgtggaaagtaacgggaatggagtgccgaggtatgtccaagggttgtcggagtaagatatattgcaatgagaaggagccggactcagggctcagatacgatatgtatttaggcttgagaatgattacgtatcacacactgctttcgtcattttcttctgttcctttgcttgacgggaattgtccgagtggaactaaaagacactcgattcgagagtgtgaagccgctgattgtcggtgaacaagccgatttcccactcactgaactgtggggctctatttttggctgctaatcgtttactaggtgtgtacatactacatacggagtacagatcttatactcatgtgaacctatgttgtacatagtacaagaatagtcgaccgcttatacagccttctcatatcccgcagtttgtctggcaatactagtaacatagactctactgagagctttcaaaatggactggtcgatattgaaaggcctagaagaaatgatagatttatgaatgtgcaaaaatgatacattccaaataggctacaggcgctggagagatggagaatgtgaaaagctgtcatggtttacattaaggtcgtgctcaagccaccaagcgagcttcgcacaactccgaagctatccaggagagcccgagaagaaataaaaaggagtatgtatatcaaaaaagcaaaaaagggatagacatatccagtcagaaagcgaccattgttaatggtaaatcaccagaaaccctaaataacaaaatcctcttcttgcatcacctctaaacaaccactccagttcggcacagtgacaactccagagtgagacccaagggaccccactaggtctactagtgcatcggaaacccgaaagatgtcatttacaggaagaaggcagcaacggcggcggcaccgacgaagccgagggagccgctgagggtagcaccagcgttgaaagcaggggaggaggtggcgggagaaacagggacggtgccagtggcgacacccttgctgctggagggaacgtggggaacaccaccggtggggccgtgggggatgacgctagcagcgggggtagtggcagcagcggacacgggcacggtcgagtagataacggtgggcacgcaggtggtgatagcaatcacggtggaggagaccggggcggtgccagcaggagcgctggggacgctggcgggaacgctgggaacgctagcaggaacgctgggaacgctagcaggaacgctgggggcgctggagggagcccaggtggggacggaggaccaggcgggggtctcggaggaccagacaggggtctcagaagacgaggggggnnnnnnnnnnnnnnnnnnnnnnnnnnnnnnnnnnnnnnnnnnnnnnnnnnnnnnnnnnnnnnnnnnnnnnnnnnnnnnnnnnnnnnnnnnnnnnnnnnnnnnnnnnnnnnnnnnnnnnnnnnnnnnnnnnnnnnnnnnnnnnnnnnnnnnnnnnnnnnnnnnnnnnnnnnnnnnnnnnnnnnnnnnnnnnnnnnnnnnnnnnnnnnnnnnnnnnnnnnnnnnnnnnnnnnnnnnnnnnnnnnnnnnnnnnnnnnnnnnnnnnnnnnnnnnnnnnnnnnnnnnnnnnnnnnnnnnnnnnnnnnnnntggggggggtggtgctgccggtaggctcaacaccggcaccgctgttgccggggcagttggtgacagtgggagcgcaagaggtgatggtcacctcatcggtctcatagacggtcttgtcggcaccgggggcggcaatggccaagctggcgaagagggcgatagtggcagtagtgaaacgcattttgaatgttatgtacgaaaaccgtaaaaagtgatgttcaaaaaaggtatatataaaaagcgtagcttcttgtttgaaagagagtgagttggtgtttaaagagtgtaagaccgaagtcgagagagagtgaatgctttggaagaatgtacttggagagaagaaagaaacaaaaactacacgggggaggcagggggcctttgtatgaacggggagattagtgtcagatcagcagccactcgctttctctcttttgggacgagtttggccctaaaaaaaggggaaaataagaacgacggtgtactggatacttcatccactactaacccacaccgcaacctgacatgtacctgtaacctggctctcgcacttcaatttaggccattctatgattggatcgatggcgttgtttcgaattaccaggtaattttgacccgccggtgtttcttttacttgtgacgatcgcttcaacattagggacgacgacatatcaaatggttatatcctccgtcctaagatgcatatactccgtacgctctcccctcaagtaagaattcaactgcaataatactcctctgcaacacccacttcctctcagatgtgttctttttctctttctattgatgtttcagaccgcatcgccgatccactacccgtccctggcgtcccagttgttggcatttccccgtgggtctcttctcatctccacttacccctgaacagcccgccatttatttcgccaagagaacgtattgtgtaagggcgaatgatgatgtgcactttacttgcaaaatgggattggtttctactattcatattactttggaacatggaaccctcttcctttgtcggagcgaagcgccgagacatcctttgtattattacttactatatacgggtgctccgtactccgtactgcttgtatattagtagtaatttttgtattactgcactgtttcctccggtgcactgggtatatcgtcgtccgagacttgttacgttgaccatatatagcatagatgaacttaatatattgtactcatcgtgtaaccaatgaaatactatgaagaccaattttcgtaaaactaaataaacccaaagagcaatgccaatagtacaagtcactcaagagtcaagactgccaattgcccccgcaacgggaaggtcttgcttcacgccataacggctagaccgcattgttttacttccgggacagtgcttgatgttgcttgcatctcgtgcccctgttctaggcaatgtgggcgtcaatgcccaagtccgagcgcagtttgaggaaataatatcagggtctgaccgtttgattggtggcgtgcatgcagtaatttggagttacaccggtcactcgagctgtatgttgtagtctgtagactctagagtcgatttcctgtgcgaaatatgtaccctaaaatagctactcgtgtagatcaaagcgtgttgatcttcatcctgttcctgggtcgaaagttcggttcagactttcgaagtggttcgaccgtgcaagtcagggcaggatagcgatgtatgttgattagccaatgatcgctgagtcctggtctatgtccttgactttgactttggacccgactccatgataggggtttgttcacaccaagcggtttccgtaggccgcccccagactccacctacctgcgcttcgtggcccctttttcaatagatcgggcctctattctattccaacgtgctttgtatggcatggtcgtattcttatcaaccccatactcatctctggtactatctttagcttcatttagctttgtgggatatgattattggtggagtgtgtttgatatataaagtacggagtatctggcacaacgttcagccgtaccgttaatgatagggacgtgatttgagtggatctaggctttttccgaagttcatcctcgcctatcgcgtgagaggtccttgaccttcctcatttgctcctcatttgtctaagtctctgatatttagtaaggggctttcgcttcaacactcaccgctcatattgcagtctcggggttcttagaatcctgtaaatatcctactctccttcctcacatcttgcaatattcttgagcattgccctgcgccacgagcaagagacggatatcatatcggccaggtcaagggatttgtgattgacaattaagtcgacttgactgcacaatgacttgaatcttgaaatgacaaattcaatagcactttttcttcgttgtataacatagaatgatgtccttagcgcccactcaaaagcacttccgtgttgatgcgagactgttatcggctactctatcacatcgcctagtcaactctgtaggatctgattgcgtgtgatcgccatcgacaatcacagatcggacatcaaacccgaccgatcagcatcgacgcgtcatttttagcgctgatgacacaagctggcggtaccgagaagtgtggtttttgtctcttgaataataatactccgcatatattccagatacacgacatactgtacaccacaatgggctatgcttgaagcgccagtgagatcgagatctcttgtttcccaaacagcgactttccgtataaacaagcttttcgaagacaagcagacaatctcgtcagatattcatgatattacttttatggctaggtcgaacgtcattcaagatcaactattacgacagggtctacgtacaacatagtaaattatatacagcatacggattatgcattctccagcttcctagatcgagattcacctggcgcttgtctcatattgtaatatccacaatggggcttattgtactattttgcaatacgcttgacctcatgttaggacttggcaccggctttcccggcaagaatgtctaattaaatcacagccttagaattgaacgcttccacagtaactgatctttttttaacgcccaaatttcgggaaaagacagtgacactgaaatgctactggtgcggatcgactagggcccgcccatgtcatcatcgggtctcattgcgtggccacagatttgggctaagccacacctttccaagggatagaatcgtagttataattatcttggaattagactagaattggttttggacgagcccctcgatgacatattgcatgtataggtctcgcggtagaactggatatcgcatcgtatacggagtactctgtacataatacgttaatacgttggatgcatagtgaaaagtcggtacttctgtaaggctggcagggtaagacccctacggcctgtgataggtcatattcaggtgggggacagccctgaatgtgttggcaatgatgtcgacgccacagttttgggaaaagtattcagtaattgcggctccaaggaaacaacgtaagtttaatgattgacagtcgagatctagtcttttgggttggttttagtttgacacctccgtggctacatatgtgctatgtacctatatacatgtagatacatatacggagtatacctgcatcgatataaaaaaggggagagaaacatgaaccatggtactcaggagaattctatgttgctttggaagaattggaatagacatcaacttccacggttcacacaagaatctagacatcctcattgtacaattctacatcgtagacgtaagttgtagatgtttcagctcaggcgctttctgaaacatagaggccccaccacagcccgacctctggtgtcggctgtgtcgctctattaatattctctagagaagatagttacaaagatttgaactagaccctgacttgacatatatactctgtagcgaagtacgaaggactctatttcttatatggtggagtaacaggtcacctgccgcatctctcggtaacttcttactccactcgtttgttctctaccttatctctgttgcttctgcttctgcttctgcctctgcctcttctttggtctttgctgtgcctttgcatttgcttcttcttttacttctgctctgcttttcatagtatcatctgtttgcttcaatccgcctttttccccctcctcccaggactccccaaggcggactggtccaaggccgacactgtggctactctcgcagatccaaacgagttgttcttgcctggcgaaaggcaaaacaatctcgccatgtcgtctcctgttcctctccttcgtccgcccgttcctggcgctcgcaacaataccggcagcccgcgagccccgaagctcacgttaggcattcccccctcacctagcgccaaacccgtcaatggcaatcccgcccccgcccaagtacctcaaatccaaacccaaccccaacctcagcctcgcccgtcgggtcgaccagcacccccacgactgcatctcgcaacccctatgggtagccagcagaatgtatctccgccaacccttatgccgaacggtcgaccagccccgcccccactgagtacaaatggcctaggaggtggaagtggaggtgcgcccattctacaaattcagaccaatggaccagcctcttcaaacccttcatattcgacgattaatttcgccatgggacttcgacagccggatggctcgtcagatccgtcctcggctattagctcagtgtactcagatcgcgagaacggagaccgtgaacacagtgtgaacggccttctccccgatctggacaaattgagtctggagaagggccggccccttgatgtggatgatctcgatgatgaaggctggcacgcggccagtgaacagaatatgattgttgaactgggaagtctgggagagggtgctggcggagccgtcacccgatgccgactcaaggagggaaagaccgtattcgcgttgaaggtgcgttgcttcagctagtcaacttttgtatacctgcgctcggcgatagaggctaacatcccatcctagatcattactacggaccccaaccctgatgtcaagaaacaaatcgttcgtgagctcaacttcaacaaagactgcgcttcgcaccacatctgccgttactatggtgctttcatggacaaatccactggcaccatctctatcgctatggagttctgtgaaggtggaagtctggacagcatctacaaagaggtcaaaaagcttggaggtcgcactggagagaaggtccttggcaaggtcgcagaaggtgtcttgaatgggttgacctatctccacagccgaaagatcattcatcgaggtacgaaccattatccccgatatacattgaccatcagcggctaatgttttctagacatcaaaccatcgaacattctcttgtgccgcgatggcaaggtcaaactctgcgactttggcgtcagcggtgaattcggtaccaagggcgacgccaacacttttattggcacttcctactatatggccccagagcgcattactggtcaatcatatactattacatccgacgtttggtctctcggtgtgactttgctggaagtcgcgcagcaccgattccccttccctgctgacgggactgagatgcaaccccgtgcagggctaatagatctcctaacttatatcgttcgccagccaattcccacgttgaaggatgagccacaaaatggcattcgctggtcggacaacttcaaatacttcatcgaatgctggtatgtactctgtctgtgtaactctaattcttatatactaacgcgatcaccagcttggaaaaagaaccccctcgacgtgcgacgccctggcggatgctggaacatccatgggtgcaggatatgaaaaacaagaaggtcaacatgacgaactttataaggcaggtgtgggattggaaagagtaaacacgtccccaaggacccttttgagggtgccttactgctttgctgcatttcttttgagtatgagtggctggaccccaaggattgacctggctgtcaacaactcaaccccgtttctcacgactctacttcgtatctatctgcgttttgtgctttccgctggctccccccgggccggaactggcggggctcgacattactctcataccccgttaccatcagcaaatgctttttcctttttttcttcgacacgaatctcatcggctacgcttcaccttctacgatccttaatggcctgacattctccatgcattgcatacccttcaatccttttcgccctctccttcccttctcgctgtttccgtcgtctccttgcgatggactggtctctgcttttgcttcgtcttttcccgtcacatcgagcctggacatatcctccatcttcgtatatcgtgttttcgtttttagtgtacagcccgctttcttagtctgctccaggattatatttagggtctactttgctttgcactggatgcgggagtgttgcaatgcttggagacttcctttgggacatacttaggcacttaataccattgcatcttgtcttcaacttggatgattatgtatacggggacaataatatacgtcagctagtccttctgcttctaagaaaaaatatgtctcattgttatcataaaagctacatacagcacaggtctcgatatgcatcctcgtcaaccacaaaagcaactgtaagggatcccaaccttcagttactcacaaccctatattgttcgcgcctcccctacttcttgctcaccggatcagcgccaagaacccaaccaatcccactaaccaagcccccggtcatcatattgctaaccatatccctcttcctaacacgaccctcactatccggagatagcggccgagcatcatcccgaggagggagcgacgccgaactatcagctgcgctcctcagcgggaaagcattcttatgtagcgccaaagccgctccacgagcaacctcaaacagacccatcggcgcctcgtggcgacgagagttcggcactgcagcgcgcgcacggcgcgccgcgcgctgctgttccgtgtcgaaggcgtcgcgctctgagtctgacggcccgaatccgcccgggacggatgtcagtgtgtcgccctttctgtcccagagatcttcttcttgctgctcgcgcgcgcgcagcgaggtgagttcttcatcgcagcgacgccaggcgccaaggatttccgggagtgggtctggggatgggactaggacgagagcgagggagaggagttccattcgctgggagaggtgcgagatttgggattggagggttggtggcggttgggttggtgttgtggcgcggtagcgacctgcgttgtagacggcgcgccaggtgatgtcgtcagggacggaagtggtgtttaggagcggggaggaggtcgagaggagtgacgggggtgtgagtcgcgttagaatgtaggagtaggctgtgccgaagtcgttggaggatagagcagacgcaattgctagggaggttatgcggcgctctgcggcgagtaggacgtgctcctttggaggattatagtgggttggctcgtcttcggctttgtgtgatgccgcttgcgtgggaacgtctgctgccactaggtttcgtccgatggagagaagatcgtctagtttggtgtagctctttgggttttgctccagtactttctcaatcaagaggattggatcgtgatggacacgaatgctaacaggctggaatggaacaccgtgttgcagggtcagcgaatagtatgacagcgagtgggttgcggcgatgagggcgtggatctttttgaatgcaacagattctgggaagtgtgatgtgaatgattgtaagctaatttactgtcagtgctgagtccatacatcttcttttagtagcaccacatacatatcataagctctcttcattccgccccgtgttcgatttccgttgcttgcattatcataggctgtaaatatagcctcttgaaccgcagcttccacttggacaggattcagtggcgctggtttagactcggtgtatatatcgagcgccaattgatactctagaaatgccatcagtattgacaatgaatagtgaatttggatcgcattacctttagctgccagcagcgccttcaagatctccgtttcaaccgtgtcgcggggaatccgccagaaaattccatggtacggtgaaggttcatcccaggcgttgtcggactgttccacctgccaatctcggagccaaagcaatcgttgtcgaaccatagaccagtcttggtttaaacccggttgctgcaaagtagaattcaccacgcttttgagttcggccaattgcatttcctcggtgctgtgaaggcacatatttgccgcaacccggcagggaaccagatgaccaagttcggtcagtatacgaagggagagaagtaaagcgctaagaaacgatatcgctgggggcgatggcttggtaagaggattcgtccgtctcaaaagagagttctgcaatagagatgcgcgggatgtcgaggagattgactcggtatcatagtgcacagatggcagttctgaatcaggggtgaggtatgagctgtcttcgagaccgaggagcttcgcaaccctcgtcaagacctggaacgagccatccagcacagccgtcgatgagtttgcatgggcatacaccacagcaagacccgactggccgtatcgaacctgtaaatctctcgcctgctcttcggaatattgcgctccagcattgtcatatccccccaagtccacatctgatggtccatcccagtggttgaaggcgctcacaacgctgtcgcggtcgacaagactccgcgatagtagccattcattcacatgttcccatccagccaattcagttgcttgaggtctctcggagccttcaatgaaagataccgaactctgctgagcttcttcgttaagccttcgccgttttgaccgattaccaccatagagccaaggtccaatcagacccttcaagttgttgaccaaatccatattgttctcttcggagctcatcagagacaggagaatgttgactgcggtttgatcgtccatagactccaagatctcaagagatatagtttcgtcccgataggcgtagaattcgtagttcagtcgaagtaatggtaataggctcgatatcagccatgttcgaatgattggcgagtgctcgtagaaggggacgataagatcgagaatgagaggctgtagcgctgtttccgagtcgatcagatgtgcccggtggataaggaatttggtcaaaggatctgctgaagctatctcggcttcctcatcagggcgttgtagtggccgtaaatgaagcttccgcacgcgctttctggcgagcgattcggacaaatcctggacagcagatgtattaattggtcggtcggattgaaaattagagctatttgctagctcttgtagcactgaggtgtactgagagggctctgtgctctctgggagaaaggtcaagatgatgcgcaggaggcgttccaacggaaaacaatggggaaaccgggcctgtagaataggcaagtccgccacattaccacctgcgcagagttctgtagctagtagaatagcatgtacatcggacagctcttcgagagccatggtcaagctaaagagacgaggcagtcgagtgaggtggcctcatagttggcgatgaccatgttgcatacggcggggcgcacagaccaagtcggaaatgaaagggaagaggtcgcatccgccggcacttcatcactacctttttcgcggtctctgtgcctacaacttactcaattctcttcttatacgtatcacaatggcttccggttacggtaacagcggtggtatgtgctcatttcccccatccccggggaacctggtcgggtccgcgccaatatgccctcggatcacaacttgcgcacgcagttccctcccccgcgaataaaactggctaacacatgatggtttctcctaggtcccggacgctgctatcccttctggcaagaggttcttggttgctacgttgtgaactcggacgatggtgccaccggcaagaagaagtgtatgcccgccctggaggactactatgagtgccttcaccaccggaaagaggtaagggcaatccccattcgatcacgatacctgcacacttgaatcatggacctagctctaataatggggaaattggaacaacaggctctccgcactatgaagatgcaagctgcctatcgcaaggccgaggccgcacacccgcgagagaacgcccctaaggctgagcaaatccggagcttgggtctacttggaaaggaagaagaggcagccaatgtgttgagttaacggtgaatgggaaggatgtgcttgttctttttcgatgcgtgtgtttccgtgtttccgccccgggacttttgcccggggcctgtgactgtatagaaccgctcaactggttgattatcacgtctgtcagtgcgaaatgatactccaattcaacgacaaacggtgctttatcctaaattttgatgcgctcgatctttggatttcggtaatgcgagatgctgccatgtaggacgagatatgcctgatctcggaagtttaattaacgagataagcatgtattttgattgggcgcaggaaattaactcgaattaccagctccagccgtctagccgcttatcccggggttctttgtgtcgctagctttctctctgtatcaaggaattatactttgattatatgatacgataagcccatgaccgtctttataagaaggatgtaagctcataggtatgttctgtatgcttggcttaggggaaagtaagagaataacagaagtggacgagaatctacggagtatatagcggatatatagttcggcaggacgatcgatatatctgcatagcagcaaaattcgattgacatcttatcctttatatataggtacagaaaagcatcacttcttataccatgatctgatcacttatttttcagctatcataaaactatcacatacatcagtgtatgtacacgcactgctacattcgtaatcttggacattgaagaggccatctggcatgtcttggcgttgctccttccttcaaagcatagacgaaatctcaaataaaccttgacttgaattatccaccgaagttcgctccatcacaacagcccccagacattgaaataggtatttctgaccaatctaaatgctctatgtcatccaacgcgttttatggactcacgtgaccctttcagcagcagaaaaaaaaatcggcgcgctgtgagtggaagcccaccgcccgcgctaaaccacaaacagcctaggcggagtgacccaaacatggaccagcgcgccgggcagaagcacccgcaatgatataaacccggctgcgtgacctcgaccctcgctcttgtgtactaaatctaaatccccccgctgactcatcatcgcggcttgaggtgttaggcgttcggtctttctttttccatatcgaggtccttccaccttaatttcgcgccccgctccgcgnnnnnnnnnnnnnnnnnnnnnnnnnnnnnnnnnnnnnnnnnnnnnnnnnnnnnnnnnnnnnnnnnnnnnnnnnnnnnnnnnnnnnnnnnnnnnnnnnnnnnnnnnnnnnnnnnnnnnnnnnnnnaccttatttgcgcgcttcgtcgcgcgcaattgttcttttcctcgtgttgttctcttttttttctcttattcaaattgtcccgcatagtcggaagaaaagcgaagacccacgatggcttcccggtaagccccttcagccagttaccacgcgcctgtcacgtgaagctaacctaattcagactcgaccgtctcgtcacgtgagtataatggcccccaatatgtgagatcacgtgaagcaactgaccactgaccaatggcaatacaggctactcgagacgggcagtactcagttgattcgtaatactgctgctcagcagcttgcagatgtgcagaaacagcatccagatgaactgttcaatctactcgggcgcatcctgccttacctcagatccaagtcctgggacacaaggactgcttctgctaaagctattggattgattgtctccaacgcagatatttatgatccaaacgaggacgatggactccagatcaagtctgcagcagacgaagatgatgtggagatcaagtccgaggtcaaatccgaagagctagtcctggccgatgatttcctcaaactcgacaccttggacatcccttccgtattgaaatatggtaagcggctgctcggaagtgcgggcaaggagtatgagtactccctcgcgtccatggaaccagcttcacgtctacagcaccaaaagaagactttgactgcgcgcctaggactcgaaggcgaatacctagaagaagaccttatcgaggatatcgatctgcctcctaaagttgtaacccctgccctaaagaatgagccgactattccgtcgatctctcatcacaacagtcggcatgaagctcgctcccgcatgccttcctcgcctagtgaaagtgcgacaaaggaggacggggggctgagcaagcggcagctcaatcagcttaaacggaaaaacaagcagaatgccaagatgggggccaataaagtccgtgtcgtggatctgtcttctcgtcgacaatccgatattgccacgacccctatggccacaactccccaccctgtcaaagcagagaacggagataatcaagacggcgaccccaaacctgattacttttccttcgaacgcaccgaagaagatgacgactccaagcttgtttctgagttcaaaggagctgtcatcccagagcgacctcttatccaaccagagattgtggagcagggtgcaggatggcctctggaacacatgtgtgaattcctgactatggacatctttgactccaactgggaagttcgacatggcgccgcaatggccctgcgtgaagtcatcagggtccagggtgtggcagctggccgcctggatggaaaaagtcgcccagaaaacgatgcactcaatcgccggtggctggatgacctctcatgtcgactactctgcgtcctgatgctggaccgatttggtgattacatttcagataatgtggttgccccaattcgtgaaaccgtgggtcagactctcggtgctcttctttcacacctacatccgaactcagtccgcgcagtctaccgatgcctataccggatcataatgcagaccgacctgggactgaaccgccctgtctgggaggtctgccatggtggtatgatcgggatgcggtaccttgtcgcagttcgaaaggacttgcttgtcaaggactccaacatgatggatggcgttttggaagctgtcatgaaaggcctcgctgattatgatgacgatgtccgggctgttagcgccgccacactcgttcccattgcagaggagtttgtgtcctcccggactggcactcttggccctctgatgaacatcgtttgggactgtctttccaatctgcaggacgatctaagtgctagtacaggctctgtaatggaccttttggcaaaactttgcacattccctcaagttctggatgctatgaaggctaacgctgcagacgatccggaagcgtcatttggaaaacttgtcccccgcctctacccattcctccgccataccatcacgagtgttcgctcggctgtccttcgggctctcatgacattcttgaagctagagggtgagggcactacagactgggtcgatggcaaggcattgcgcttaatcttccaaaatcttcttgtggagcgaaacgagggtgttttgaaactgtctggtcaagtgtggtccgaactcctcaacgttgttgagctgcgcggttcgttcaaatctgaagaggagttatcggactccatccagcctcttgtcactctgactctgggcgcttttggcgttcctcggtaccctatccctatgaacacctcgctctttatcaagccctctggtttgccattctccgccgctctcccggctcccatcccccccaaaggctctccccctgcttctatcccaggcggggctgagatcaaggtgggacggagacgcaaatcagagaagaaagagaaagaaccacccccgccctcagctcacaacgtggacggacacatgctttctggtgatattgacctcgttggtgcagatactatgttgagatccaagatttacgctgccaaggcgttgggcgagctgatatctttctgggacaagaatgagctaccaagcctttggccggcaattttggatggtcttaatgtttctgcttccacaacgcagcttgcctcggccatggtcatagaagagtatgctcgccaatctggactagagagcaaatatcgctcgtcactgtgtgaccgtcttcgaccgattctcgagggcgagcgtccagcttggtatgcagacattgcgtgttaccttcatgtcgcgcgctcccagtgtcattcattgttgaacactttccgggatcatgcgcatgtggcaccttcccgactgccaaccttggctgtggtcgttcagggcgacccagaagccggacctaatgcattttccttggcggacgctgagaaaattgttggtcctgactttgatcgactgaagaaaaacctcacaccggctcaacgaatcactgctacccaagttttgaacgacacccgtacaaccgcacaatccgccgttgaggaggcacgattgatgagggaacagcgggacatgcgtgttttagctgccactgctggtgccttggtcgcgttgcgggatatccccaagaagcctggtcatatcatcaagggcatgatggacagtgtcaagaaagaggagaatttagaacttcagcagcgctctgcgacagcagtggcaggcctcatcgaacactacacagccgccacgaagcgtgggccagtggacaaaatcattggaaacttggtcaaatactgctgcgtggacacttccgagacacccgaattcccgcacaatgtgcacttggagaaatcaatcttgtcgctacgcaaagaagaagaccgacgcgaccatccagatgcggccaaattcgaaagagaggcaagagaggcacggattatgcgtcgtggtgctaaggatgcgctggagcagctggcagtcaagtttggcgctgagcttttggagaaggttccgaatctcgcgaaattggttgaacggccattgaaagatgctttgacagaagatgatcttcctgagaacatcaccgacccagagaatccacttggtcaagaaattgtagatggtctttctacactgcgggctctactgcccaagtttgatccgggtctgcaccaatgggttatcgaccttatgccgatcatcgccaagggtttgcagtgccgactttctgtcattcgctacgcagcagccaaatgtttcgctacaatttgtagtgtcatcaccgtcaagggcatgacgatgctggtcgaaaaggtcctaccaattatcaacaatgggctagatgtcaatcaccgccaaggtgcgattgaatgcatctatcatctgatccatgttatggaagatggaattctgccctatgtcatcttcttggtcgttcctgtccttggccgaatgagcgactccgacaacgatgtgcgtcttctagcaacaacctcattcgccacccttgtcaaactggttcccctggaggccggtattcccgacccccctggcttctcagaagagctgctagctggccgagaccgagagaggaagtttatgtcccagatgctggacgtgcgtaaggtcgagccattcgaaatcccagtcgctatcaaggctgagctccgaccttaccagcaggatggtgtcaattggcttgctttcctcaatcgctacaatctccatggtattctttgcgacgacatgggtctcggcaagacgcttcagaccatttgcatcgtggcaagcgaccaccatatgcgggcagaggagttcgccaagagccaatcgacggactcccgaaaactgccttctttgattgtctgtccgccttctctctctggacattggcagcaggaagtcaagcagtatgctccattcctcagttgcattgcatatgtcggccctcctgcggaacggactagacttcagccccttctggccactacagatgtcattgtaacttcttacgatgtttgccgcaatgacaatgatattctctcccctatgaacttcaactactgtgtgcttgacgagggccatcttattaagaaccccaaggccaagatcacgtcttcagtcaaaaagttagccagcaatcaccgtttgatcttgtctggtaccccgatccaaaacaacgtcctcgaattgtggtcgctgtttgatttcttgatgcccggtttcttgggaaccgagaaggtcttcttggatcggtttgccaagcccattgcagcgagccgtttcagcaaatcctcttccaaggaacaagaggcaggtgctttagcaatcgaggcactgcataaacaggtcctgccattcctactccgtcgtctgaaagaggaagtcttgaatgacctccctcccaagattatccagaactactactgtgatccgagtgaactgcagaagaaactcttcgaggacttctctaagaaggagcagaaggagttggcagataaggtgggcagcgcggaccgtggcgacaaagaacatatcttccaggcgcttcaatacatgcgacgtctatgtaattctcctgccttggttgtcaaggaaggccacaagcagtacaacgaggtgcaaagcttcctgacggccaagcgttcgaacatcagagatatttcccacgcgcccaagctaactgccctgaaagacttgctggtggattgcggcattggccttgaccacacagcagagggtgaactggatacaggcgcaagctatgtcagcccccaccgagctcttgtgttctgtcagatgaaggagatgttggacattgtgcagaatgatgttcttaagaaactcctcccatccgttcaataccttcgcttggatgggagtgtggaagcaaccaagcgccaggatatcgttaaccggttcaacaccgaccccagttatgatgtcttactcctgaccactagtgttggtggtttgggtctcaaccttacgggtgcagataccgtcatcttcgtggagcacgactggaacccacagaaagatatccaagctatggaccgtgctcatcgtatcggccaaaagaaggttgtcaacgtgtaccgcctgatcacacgtggtaccctagaggagaagatcctgaagtaagtcactactatcccacaagaaccccgcagatgcacaaagactaacgtgatccccgccacagtctacaacgattcaagatcgacgtcgcctctaccgtggtcaatcaacagaacgctgggctcggaacaatggacacagaccaactacttgacctgttcaatctcggcgaaacggcagacacagccgagaagccaggcgacccagccggcaacgaagtcgatatggttgatattgacggcgaagtcaaggagaagggcaagaagggctggctagacgatctgggcgaactctgggatgaccgccagtaccaggaagaatataacctggattcgttcctggaaaccatgaaaaactgataaatactgcgccgcccatccccgattcgaagcttatcccagcctagactcgatgtctgcttcgctttttttgcatctcagatgcatatctacccatcttccgctcccctgcgtctgattcacgttttcacatctcttcgactcaaccctcccccaaaactcccccatatcctcacaaccccaaatgattgtcatgcttaatgtcactgtaccattctccgtcctataccatggaaacttttgtctgcacggcagaccggagcataatcgcttattcattagttctaccgctgggaaggccctctgatttctgctcgttctttctattcttcttcgaacccttcatgtattgctagcttctttgatctctccccacaatggatggagagtctaattcctgtatgtgtacatagcaagtcctttattcttccccaacattgatatcttttttttttttgaaaagtcaaaaacggcgtaaactagcggattgttcactcgtcattggacatggataggatgcacacaactgacgatacttgactgcacggttttgatttggaatcttcattgaaaaatacatacacaaaaacaaaacaccatagcacctttccaatggcaatgataatagcccgaaagcatagctgcgaacgccgtatttcccaaaaaatgttgaccggagacagaggtggaagacaggaagaaaaactaacaccagccacgaaaagaaaatattccgcgaggtggggaggctccgaagaccctcaaaaatgatagtgtagatacaaatcaagaatggaaatgttgatacgttgacaccgcagaagaacattactgcagcgtgggctggactgcaagggtccagaaggcggaaaacaagatatcaacaaaaacaaaaaaataaaaaaataaaaaaaccaggtattaggttgatcataaggctgaaaaacaattcatcagacgcggcctaaaccgccaggtatgtgctcgtcagctcattccatgtttaagcctgtcccttcggcttcgaaagcatgttgaggcggctcatgctgagaacaccgcgactcttcttgctagctggagtaccgatttggccagaaggacgcacaggagtcttcgtaaggcgtttcttcaccggacttggagtaggcgggttagacttgaacctcttggtgctgcgctcatcggactgcatatcggcaggcggcacattttcacgatctgcagtgttgggagcatcctcatcgttgacttcactgcggtgtctcttcttattaagaatgccgtgagcaatgccatgagtcagcaccggaagctcttgatatggagcgggttgttcaccggcattcgatttgcgaacacgacgaatggacttgaattcggaagtaggagtagtggaagttgagacagccgagttcttctcgggagtgagggccgggagagtggggtagaccacaaccccgggcatggaccgaagctgagcggaagagaccttggaaggagagggtgaggcgatagcaagttcgtgacgagacttaacacttggagtgaattcaacgtgcttctttggcgaaggggttggcgcggagtcactcacatcaccagctcctccaaatagcgacttggggttgaagtcgggcgctgcaatgtgggtgccagaagcaattttggcagggtcgcgggagaagaggggttggcgccgacgaagaatagatctaaggctaccaagagtgggcaatttacttttgaggcgtgggttgaaatcagtgcgaggggttcgaggtgaggccatcgttttggcggccggagacaaattcaaagatggaatcattgaggttctcggcgccttgatgctggtagaggtcgtacgagcaagcgaagcatgtgtgggagtcatgatggaactgcgaacgtttgtgcgagggcgagggcgaggacctgcaggtcgacggggggtttcgaccttttgtgtttgatcttttgattcatgactagtggatttatcttcgatttggttgtgcttgacacgcttggatgctgtagcagccgtgggagtggacaattttgagatcttagtggcagggcgagaaggggacgagttctggctctctggttcgtcaagctgcgctttggacttggaccgcttcagggacttggtaacaggctggaagcgaccaggggtagcacggaaagatgaagcatgtccggcaatggagtccatctttctgaattccgccatgtggatgtcgctgaaacggttggccctgccctttggcatggcaatcttccggtccccatgaattttctcggccttgtgatcttcacagtcttgctctgagttgctctgaaccatttgcgccttgattcgagccgcgtcagcacgaaggctttccatcagcagtttggcctcttcgctgagttccgtctcctgggattgaaacttgtactcgaaccctggggttccgaactggtcgatcgcgggagacgccttggatttggtcggggtgttgtcgctgatgccgtgcttgactatattgccattggcatctttcttgatgggattgaatccgaggagcaggcctgagtctgcatgtttagttgtgctctgttgggctttgctgggatgcatttcttcgcgggacggacgagccgcagtcacactagtaggggtcctcatactagcgcgctttcgttgagcggacgcccgaggagttttcgcaatgggagtttggatgcgtgggagttcggggtcgtcaatctcttcgccttcggcaacagagtgaagtctggaagctgcgactggctgagtggtcatgtcttcaacctgaaagaaaaaaaaacaattgaagttagtttaccgcgatttcgacgatcatcaggaccttaatctgtcccacagcaggcgtcactatgctactcacctccggggtgttctggcgacgaatgcgagcggaacggcggatcgccatgactgaagacgtgaatgcaaggaatcaacaaatatcaatagaatgcaatagccccaagaagcagtgcagggggtaaatgggtcgagacagggtgtgggggaagcatcaaagtcgaagcgaggccaaaatgtaaacaacgcgcttgacgtcagatgactcagctcagcatcgtcctgacctcgggagcaacctttgtactacggaatacaaactatcgctaactacacattctcgctcgcatattattctccttaagaagtcttttatattgatttagttaactaccatttatcttaatcctcctagatgaatactaatacagtttcatcttgttccaatagtaaaaatacatagcaaatccttccaaaaatcgtagaagatgccacagtgactatcaaaagctggctaaacttcttgtcacaatatagaaaaaacaaagttaagcatggtttccatgcaagtgctcacgcaagtgctggcgccagtgctcatgaatgtgcctctcggtatcttgagtagcggtggtctcctgcgtagcagcctcttgagtagtagtggtgtattgcgtagtggtggtgtattgtgtagcggcggtctcttgagtagcggtggtctctgacgtagcgacagcctcctgaggagcagtggtctcttgagtagcgggggcctcctgagtagtagtggtctctggcgtagcggcggcctcttgagtagcggtggtctcctgcgtagcgacagcctcctgaggagcagtggtctcttgagtagcggaggcctcctgagtagcagtggtctcttgagtagcggcggcgttctgggtagcggcctcagcttcctggccccatccagtgggcgggttattgccgggcaatttctcaagaacaccgtcaatctgctcggggactaggttgggaatgttgcatgtagttgaggcgtcattgatgaaaccagcatcagcgcacttgtccattccagaatccccagcatcacagttatcaatgatcttctgcaagaccgattcatcccagccagcgatctatattcgtattagccagtagtcccagacatatcatcctgtaatgcaaatagatatactcacaaagtcaccatgaagcgaataccccgtccgatcgccgttactgagaatgaaaggctgcgagccggtaccctgggtccacatatcggcaaacagcggtgtgttccaatacacctcgtagaagatatgaggaacgtggatccaaccctgtggacagttcgccttgccaccagtggtacccttgctactagggaataccatgtttgtcttgtagtcatcaagcccagcctcaggattgtagcacgaggggaaatggatatcggcacgcaggggcgacgcatagccatcgcagttcatatccgggaagccagcgccagcaccggcattgtttggatcttgaataccgacaccgtggagtccatccgaatccggtgggtaggaaggcacatcgtaagaagagcgggggcatgtgaactggacaggttggatagttccctggttcgtgtcgaggacattggcggcaccgcctgggggtggtgtacgtagggagctgttaccgatgaacatgcgcagaccgacagggaaagctttgatctcgtcgtcggttggctcgaagaagtagtagacattcatgtagaacatcgggaccgagaggaagctaccattatcggcttggaagtatagcgacggagtccagtagttgctcttgtcggcatcgacgagggatgaggtgcagttggagtccagcagggcatcgtctgtcatggtggggttgaaattgcttcctccctggatggcgtgcgagtgtgaagccgcctctccggggttcataatcggatccatacgacccattgtcaggggaccattgccatagaaatggttcacggcaaaggtacgcgagtcttttgcgagtgctaactcgaagaagaccgcggaggtcacgagagtgcacaaggccttgacgtgcattttggaagtatatcggaagaatcggttgaaatagcaatatgcagcaacgagaaggatgcctcagaattaagtagaaatgaacggcggctgctcaagtaccggactcgaggtaaaagaatggaatgatgtttggaactcaacaaaaagaggaagggccattgttatataccagggagaatcgttctcatagaatatcctcgtcaattcgttctcgtcaatcgttctcgtataatcgttttcgttctcggtggggagtttcttcgatagttaatggagaatcagggtccaggccaaggactccacatggtgtcaataggtgattagacgccttgttaattgtgtagaaggtaatgggtgtaataagatgaggagggtgtttcagggtagagtgttttgaaacgtggggctacgccttagggcacatacagttacctaaaggggattggcggagaggatgataaatcaaatcccagactcctgggaatcgtcaatttccacatgtacttttcacatgcataacttttgtgacacatcatatgattagagtggttgctaaatacggtggatttgaggctattcccggaaagtgtacctgtcatccctttccatatacttcgtttagtaaatcacacagacagtaggcgtagtacggagtggtagtatgtagaattcattgatactaatcccccgtgaacattatatacactcatgttacagtttcaccactttgcccttatcaattctttcccccttattgaaaacagactagtctttatccgcgttaactctccggagattaaaaggatgtttaggaagaagactaggcattaaggtagtccactagttaatttaatatggatatccggtgcaatgctatccggtgaaatccggtgtccttggtgggcttgctagtttgccacgatattagtatctttgctagctctcctttctcaaggaatccacatattgttttcttaaagatgcccacaatgtactccgtagcattcctagggatacacccaagacacatgttcaggagtaaaacctccagtaaatattattcaagagacaaattatagttctgattcttgttgcaggaaataaatacaacgaagaaataaagtctggtagcgagcaactctgtaggccaatgccaagaccttcagcctcgagtcactcccgacgtctcttcaattcaactcctgactactcgctgcttagggtggcatcatgaaataataatgagccccgatggaagaaagagaaacaatgtggcacttgactctcaccctagagtaaaaagggggagaaaaacaacttcctgttcccaatgtcacgccaggaagcaaaaatgtaacagagaactgccttgctctcgttgtattcaacgcggggttcctcaactatgtcaatggccagagaaggaaaagtgccatgcgatgccaccagaaagagtgagcactgcaggtaccggatatccccgcctcaaaaacgtagatcatggctaaccatatagcagatacccagggcacagaactggggcagttgtatattgcccggggagcacctagcttcttcggtaattcatactttggccaccaggtggcagcccgcatgattcaggagtcagcccccgatctgcccccgatgagtttgctgtctagcaaggattctttgcaatcgtttcggaatgactctgggcccttttcacaagtgtgggatttacttggtctattaccgcggaataaagtaaccgtggatcgactaatcgagaaattcctgaccgagatcaactgggttatcgacacagttcaccccgaaaccttcagatctcaatttgcagagttctggggccaaaaatttggattcgacgaaattgctggagtagatcttcgctggctcgctcttttgtttattattctcgcttttagcgtgctcttggacaaccctactacttcttcgcccgaaaagcggaaagaatgcgaagaagcctctcttcgtttctactgggctgccaggagagcgatcgttatctcaccctcctttcacggcgagagcttagatcttgtcagggcagggttgatggttacgcgatatctgttatacaccagacaagtcgcagagagctggctcaccatcagctttgccatgcgcatggcccaagcacaaggcatgcatatagatggagaaaaatgggggctatcgagaaaagccactgaaactagaagacgtctttggagcaatctgtacttgcttgacaagactattgccctcgctctcggcagaccatacgcgatctcggatcatatgtgtctcatcaaagcccctgataatatatggctggatgggatgtctgatgaagagtcctctcttgctacccctcgtccattgagctatcctacgatgagcacagtgacactcctcggcagtggcttaggtaaaatcgccggtgaaatccaagaccgatgctttggtttatattctgcatcgtacgatacggtgattgagatggacaacaagcttgttgcatggaaagagcaactcccgtcctactttgccgtggaagaccccgagctttcactggatgagtcacatacatttctaccttggcatcgcctctacctgcactctgctttccactttgccagaatcactctgcacagaccttatcttctgcgcgagtccatgaccaatcgcttcagccttagtcacgaggcatgcatctcctcggcatcttccgatctgaagatccgattgcagtctttgaactatggaacatcagaaaatatgagatggacactaggcacccacaatatgttcaacagtgccttcatcctgggcattatcgctgtgcggcgacccattgctcctcaaaccgcggcaatcttgaacgatcttgaggaatattgcgaaaggttacggaaggatgtttggctaaacgagtttggtcttgcggaggtcaaagtggtagagttgtgtataatccgtaccactggacttgcccaagttaccgaccagccaggtgatcaagcctcaatgagtccacctgaagtaatgccagactttatggctcaggagcgcgaaaggaatccaatgatgtcgacgcccatgaacattgagtccattgcagcgggtacctcggccaatcaaccacctggttcttcgcctgatatgatgtggcctgcagtatgggaagatcagaactttgcatttccacaggctgctgatcttgaaacttgggagcaaatgatctccgaaattgcatatcacacctagcatatggaatttcttggggtcatttttgttgtacaagcatttgtcgatatatattctcggtttttatgacggatgtagcatctcagaaattatatgacttgatctcaatattcggtagtataaaacacattcacaggatatagcggaaatcgggatggaaatccccgcctttcttttcgtatgaccccgagctgacaatgcgctccctctcctccggtgacagttggtctcgcttcttgttgtgatatcggagcaaagcccacatactagcattgccacagaaagcaagacagatagcagcaagggaaacagaatgaccaaccacatatcgtccatttatcgatgacttgtaaatttgaccagccttgagttatgttagcttcaggtcaatgccacaaaacgagcacgccaatatgatattccactcacaatcaaaccggcgcaatttccgatagtctgctgtaggcctactcccatggcacgcttgtagtagccggaatggctgttggcattccaactgaccccaagtccaaccacagcatagattctagaagaaaggttagtaattactcgacagatactccaacggaaaatacatacccagtaacacacacatatgtcgcaaaatagagcacacctcgtttatggacatccactcccagcagcatggcatagccaatagccgtcactagacacagggggaccatgaagatagctcgcatgcgcactcggtcggagagatttgcaatgaccaggtaaaacgcggaggcccagatatacacaggaacagtgagcagttgggtcttgaccgaatcaaacccaaaccctcggatgatagtaggcaaaaaggtactgaacccgaaggagcagatattgacacagatttggttgaacgaggtgagccagctcttggggtctttgagtgtcttccacacttccttgaaatcaaactcttcagtatcagcataccgtgctgactgttgcatgcgcatgcgcatcagctctttctcttcttcgttcaaaaagtaggcagtttcgtagttatttggaaggaggaagaacgtggcaatgctaatgaccgcgctcatgatgccctccacaatgaaaagccacctccaaccttcaaggccgcacgcaccatctaggcgaatcagtccaaaggcgagtctaatgttcatgttagccattgttgttcggatttgtttggcagaatagggagagttgcgcatacaatccaccaaagcctccactcagagcagcagacacaaacagatatgaaattctctgtgcttgttcctcgcgcttgtaaaaggtagtcaacaggacggtcaagcaactgcacagtaattagcttccatccaaaacagatttttatcaaggcaatcgatagtctcacgggaatagaccactctcaaagacaccgaggaaaagtctggtgatataaagcccggcgacattcttgataaatccagcagacaatatggatgcactgaagccaaggatcaatgcagaaatgagtctgtttgggcgtaatttcttgaggagcatagagaacgggatctcaaagaagacgtaggtcgcgtagaacaaagacacggcatctgggtattgttagctatagcttggaatattggacgagggtaatctcacttcctagttcatttccaactaaaccaagatcttcctgtaagagctaagtcagtaacccactgcttcacaaaacgtggactcgaccttaccggcatgccagcaacagctgcatttctagccaggagttagcgataggaaccctcgctgcatagaggaagaacttaccccaagttgcttcgatcaagatatgcaaccaagaaaatgagcatcaccaaaggacaaatgcagagatcaagcttccatagcagctttctctctcggatagggtgaactacgaagttgcccatctgcacatcgtgatccgaggatagatcagcttgtttgatatccatctccttgttcatcttgaatgagtatgtagattgaccgtatacagaatccatccctatcggttcttatatatggaagttgtcacaagcgttatcaatgatcgggaaatccttcggtttattcaagcactcgacgaaagtaagacgaagaatttcccgaacattttaggtggccatgaccaattaagtttggtgtcatggcgagagataagctccagggctggaccaaggcttttcgtgcattagttcgtcccatcggggcactttaaccttaaaactttaccataatcgcgcatatacctaggtatatctcacctttcctgaattatcactttttaactgcctccgacgtttcaatgatttcccacatggcttacaatcttgcccaggggtatattagctaatcgctatcttttaccgacagggatttccccgcgttttatcgtcttggcgtcggcaattgtgaactctaatttatcttatcttccaatttcccgatcaatttcccgacgcgaggtatggggagactgcccattgataaggagacaaagcacactcgcactttttgccattcagaaatattttatattgcctatctctcgaaatgggaatttcgaacatgaacggaaccgagttcacagaaaccccagcaaaacatccagtaagtgctttgccaagaccattactatgttggagtgatctaatgtgctataggtttggaagcgatgggttcgcttcagagctgaagatggtaaaatatatggtggggagccggtgaatccggatattgatggtatggcatactctcaagttcatgaaagctcaacccctactgacagactcatagtgggtcaggctatagaaaagaatgccgaagtaccagtcaaagtcgtggctggtaactcagcattcgattatgatgctttgttcacgggtgaaatcaaaaccattgatgaactgctatccccggtctcgcaaattgaagctggggctgttcggtgcatcggcttaaactacaaggagcacgcagccgagatgaagctgactcttccaaacacgccaacgttagtatatctgcccttgcctctaacacttgctgataccgtccagggtgtttctgaaggccagcacttgcattgcatctgcatgcgaaccgattgtacttccttccaacgtggattacgatgaagcggactatgaagttgagttggcgatagtcatcggcagaaaatgcaaaaatgtttcggtctccgaagcagtccactatattctgggttatgcagtcgccaatgatgtgacagcccgcaagcatcaagagaagacatcacagtggtcttatgcaaaggggatggtatgtcgatatagtcaatgtccaagatgaacttcacaactaacctctagcaggatgggttttgcccactcggtccatgtatcgtatctacagaacaaatcccgaatcctgcagtcttgaacttgaagacccgtctcaatggaaagatcatgcagaatgaatccgccgatgacatgatcttcaacgtgccagaaattgtgtcctatgtttctcaggtacataatgacatcatctcttttacgcagatataactaactcaagtattagggccacacattactacccgggaccgtcatcatcaccggaacgccgtgtggcatcggtatctcacagagcccaccacaattcctccagcctggagatgagctgcgaataagcataagtcatgggttaggcactcaaatatgcccgattgtgagagattgagcattgcatcaatcatatgtttttgatccgaaggtgattgcaggaatgaagtcgtcgtgttacgtactttgaattgggtatggtttcttatattttgtaaagaaaggcagcattatattaggctcatctacgaaattgtagcaattcatgaaggcatatttcaccaagtgattcaagctgaaggtgtcgataaatagataaagacatttcctggggagcaggatcctagaccaacgctgtgcctatcccataattgtttccaaattcaaatccatcataatatccaaccagaactcttctacaccagagtccgcacggtcccaagtctcgtgcacaacgttaacaatccgttgcattggcagctttggtaagattaaaataagttcagacaaccgcattttaacctttcgtctggcctgggcaatttcaacgtccagcgtattcagactggtaattgaatttcctgtggcgcccagaacagacccagacgagaaaacaagatcgctagagatgcaagctaaaactacgggctgcagaaccttcgttccagatgttgaaggaagctgtcccaaaagggatacaatgtgcaatgccagggtgtgtcgtgtgtcttccaccgaacacgacgaccattcggtagctattggaaacaacaacaaaaagagggccgggataggactttccccatctgtggtttgattacttcgtagtcggtcttcaaggatgtccgggaaaacatggtaaatttgtaatagtgccgtacagcgatatgcctcggctaacgtaagaaaatgagacgggggcgtgttcgtatcaccgatatcgacaggcccacaatagaacgagaagccagtgaagagaattttgtcctcaagatgttcggctttctgtctgagatcgagttcctcggccatggagctcaagtcaatcaaggtgggatccaaggcctctggtcttcggcggtgggaggttcttgcggctcgaattactctcgcagtccgataaaagaggctcaatgcgtatctgaaagaccctgtccacgggtgtggtaggatctgcccatcgacaagatagactgaaagatctgtgtcgctgttttctatagagctttccacgtctacaataggcgactcctctgccacaaaggcagctagtaagttccaccaaaggagacactgtttgaaaagtggatgttgttttgcgagggcagaatttgcattcttgcactggcgttcttgtcgcataagatggtcttgggccgctctcagatatggcagccccaaatcagaagcatcgtgccacccagtggtggatccaatcatgagcagtgcgaggaagtactcatcatcctttgcctgaactgaacttttttgagcactagtattcagacacgcaattgcttgctgttgtgtctgtattccaattggtcgcatgttgggaaaatcgttggccaacgaggcagctgacatgctctggatggcgaagtaaatcgccgcatttcgactccaaagccgactcacaatagttcgaaaaggattgaggggacagtcgaaagatgaccattggttacagactgtatgaaagtaatattgcaccaacattactggtagttggatgagaaaagaggggacggatgtgttgaccagtcgttgacgcaaaaccgacaacccatctagttcggcatcaggattcgttaagcccgtatcattagatcgcagctcagtgtaggaccaggcatctgttggctcatcaaaatccggcagctgatcaaagaggtttgagcaggtcgtatcccatatactcggggttccattttgaagattgtctctttcatcctgtgttggattgttcacttcgaaaagttcggtcgcaaccgtttcgggagattcaatctgtgcagctggctgttttggctcttcgctgcctttgaaaacatatcgccactgcaagctctgcttttggtaaccggggcatgtgtgtcctcgcttggtacattcctgacaacttggctttgcctcgtcacatctgcgctggataagtattactatatgaaatttcaagaggccttcgtaggtgaaggataaattgtgttggtaagaaaatctttcacctcgacttactcgccgttgcttgcacctttggcagcccccttttgactttggtcggcaccggttgggattctgccttttcttctgcggagttgatttctctgtattttccattctacgcaaagcaaagttattgggaatgttcttcgctgagagagggggaaacatcaggctgagatatcggggcatcggatgagaagccgatcaaaggatttgaagaccggtgcatgaaccgagatccgatcacctgccgataagcaacgcctcatctctgctgatattcctcccgatttgattgaagctgaattgttgaggttgtctaagtgataactatttccccgcaccttccttttgctctactctaaaaaaggatcagcaacacgcggtttccttcccttaatgcgaactagcgcctcctctatatagcatacgtgttgatcagcgtgtcaagcatttgcagcaaggaatttctcattcggggaatatcttgaccttcgggtcatcagcccctgagttggcccggagagatgtatgccacaggtcatatatgtagctttcacttcaatgacatcaagtacaagtgctttaagacacaacttgcatataaggggtatgtgtatgtgcatatgcatatgctggagttgatatgatagagatttcaaaaaacacggcatattctgacacaatgcttgggaagaagcctttcactactcttgatggaaaaaaacagaatccatattccaactctccgtcaatggcaacttgtttttcagttggtttctctccgcaccgtatcatgacatcatctatgcggagtagtccatgttctctcatcttagctttctccgtattgtgaggggaagtttaccggatatctctagccgttaagatcattgatgttatgatcatggcctcccggttcggatatctggcaatatattttatcaataccaactgccgagctgcccattgattaaagtcacctatctacgcttccagccaatcaatacccatcgctacccatatatctctcacaattccagtcctatacggctcgagaggggattccggatcatcaggacctcgtgatccacatggagtccatattcggattagcgtagccgccgtgcataagcgtcaatactctaacctatctcgtactagtgttggtgggtaaacaggagaggatcatcgatgtttcagctgagacctattgtcggtccaatctcactgctcgtcttatcttcacgtcatatgtaattgcataggtgcccagatagaatccccagttaaacgttatctcggcataaatccatttctccactcggtggataccgtgtttgggaacttgctccggggagatatggaataacagattgagtgaatttcctcctcactcgtaaatatggtcagttttatgaatatctgcacctcccctcaccagaataggagataaacagcccgaactcctaatgcttattgcgtccgaaaattcctctgtaggttttatccaactatacccaagatttgactatttgaaacttacccttgttatatcttttcatcctagaggattattcactctttcattcctcatcccgcttttgttaaacctcgatcatggcagacgatgctactgccaaccagcgtcgttcttcaaagagcaaaggctccgaggcctatgcacctgcggaataccctaacatcgaagaaggcaaacaatcgtcagcaaatggggtactagaagccctgggctatgagcctgaactcattcgaaaccgctccacgcttcaggtggccttcatgtcctttgtgctcgcagcaattccatacggactggctacgactttcacctaccctcttgttgggggaggccctgtcaacataatctggggatggcttgccgtttctttgattacgctatgtgtggctgcttcacttggcgaaatcacctcagtctatccaactgccggaggggtctactaccagacttttatgatatctccaccgtcatatcgaagaatcgcctcgtggatttgcggatggtcatatgttgttggaaatatcaccatcacgcttgcagtcaaccttgggagtactctattcctcatttcatgtatcaacgttttcgaatcctctccaggagtaggaatcttcgaagcggaaacgtaccaagtttttcttatatttatcgcagtcacattcctcgctaacgcaatatcgacatatggaaatgcatggctgccttaccttgacgtatgtctaaaccataacccttccaacatcgcttgctaatacagaagctagacattcgcaatattcgtgacatttataggagtgttggctattgtgatatgtgttcttgtggttgcgaaagagggtagacatgacgccaaatatgtttttactagttttgagccgatatctggctggccagcaggctggtctttctgcgtcggacttttacaggcagcttatagcacttcttccactggtatggtgatttggtatgtaacatgttttgtttcccaccccagatgactatctcccatctcatttctactatgaaacccctatatctgacgcgtcaaaagtatgtgtgaagaagttcagcaaccatcaacacaagtcccaaaagcaatggttggaacggtcattctaaataccctcgccgggttcctcttccttattccattggttttcgtgctccccgacacaaaggttttagcagctctcgaatccggtcaaccagttccgagtattatcaagtccgctgttggaagttcagttggatcattcctgcttctcctaccattgatattgctctcgatgttctgtgtcattggctgtactacgaccgtctcccgaagcacctgggcgtttgctcgcgatggaggtataccaggctccagatggtggaagcaggtaaacagagacggcgtacctttcaatgctatgatgcttggcatggttattcagatattgcttggctttatctacttcgggtcaactactgcatttaatgcattcacaggcgtcggagttattaccttgactgtcagctatgcttgcccaatcgttgtgtctcttgctggaggtcgaagacacataaagaatggccaattcgatcttggcacactcgggctggtttgcaatattgtgacattgggtaagcatgcacgatgtgggcacgatttatcgctatcgctaatgcatattctagcatggagtcttcttgccattccgctattttgcatgccttcttcaatccccgtcgctgccgatacggtcaactatgcaccggtggtgtttgttgcatttatactaattgcttctggatggtactgggtttggggctacgagaagtatgttgggccgccaacaatggacgatgagtttcgctcatcagacttgtaaagtaagagatttggagtaagaagctccaacataaatctgaattcgaaatctatgtgtatcttttaaagatggcccagacccctgaagaccagggcccgggctaggccctgcgccctaaggtgggcacccggccccggccccgtagctttcggctgactaatattggtccaaccaaggtttattcccgctctcttggtttctgccaaaactactctcccaacttcaagtcaacgttgaagtaatactctgaccctctatttcctgacatatttgactatggaacccccaaagaaactcaaacttgcaagtctaggtagctcctttgctgctggtcctgacattcccccacaaatcgaaccacgtgcagcgttgcgatcaggacagaattacccccatcttctggcgcagcacttgaacgctgatctcactgatctaagcgtttctggtgcaacgttgctcaacataacagtcgatccacagtctactccgttcaacatgaccttcccaccgcaaatctccgacctccccgaagacgccaatatcgtcaccgtgaccgctggaggaaacgacataaattacattggcggcatgatcgccgatgcttgcgatgctgagctccaatcttccgcgtcactatcgcccagcgaattggcagaacgactagcgggggtcgttgatgagatacacaaacgggccccgagggctcgaattttccttgttgaatatcttgctgtcttggggcctggcactcaagctggtcgggatatcccgctgacccaggagagaattcagcattaccgcggtgttgcgtctgttctacaacatgcatattctgtcgctgtggaaggtcgaaccgattggtgtgagacagtcccaattcaccaactcagtcaggaacatgcacttggtagcaaagaaccctgggttggagggtttgcatcggggccgcttctccatccgaatcttgatgggatgaaggccgtagcggatatactagctgagactattcgcaagagcacattatccaaagcattgttgtgaatgtactcgttaatcaagcagatgagagcaggtttgagctagcaccatcatcgtgatcacccgattatatcatgctcggatcgtcctttaccacataataatactatttcttcgttaagaccacgtcaaatcttgcttgtttcgtcacacaaatgacaaatagcatcagctttcacatctccataatcatgacccggtaagtgtattggggctcctaaccaggtgaaagctaccaatcagaatcctgcaagggtcttacgtgtgatctggcgtaaccccgcatttggggtgagacgggaacgccgagagcttcttcccagccctctggtaactcaagccttcttatagacaatcaacattggcccttgctactcactttaacccttataaagatccctagagaagaacaaggacgcttgcacggctgatacgcttgtagcatcgaattttcggttgtaatcaggcagtgcaaacatacgatgcgcatatttgtcgactgtcggtcaaggccatgcatacgcggcacttgtcgcccgtatagcagacaaacacataaccaataggacgagatttgccttgaatgacgggcgacctagtcgagtaagcaaccagtagtgctaacaaatccaagcggtcaatgcgagcgttgcccttgctgtcttgagtcatgtataacgtgaatttgatggtttcttttgtcaatatggcctacattatgctgcgcgttttagccagaagaattagccagaagaaaaaaagacataatacacagtatttttatatacaacgtctttattgtcggtcactcaagtcctacttgaattacatccggaagtatctctgtcggtccgaaaacctcgggaagtcatcttccgggtccacggcagaagcgaaacagtctcttcaaatgcatccgcgagttttgttacaaattagagtgtattgactgccacttatcaattggtattttggtagaccacccctccaacaaggccgtgatatccggaacctcgacaccgttcctctccccgccgagctggaggagcgtgtacaccttgcgtgtagacctgacaaacactggacaggtatacaatagactgggatttccttcttatttaacagagctattccgcgggccacttcacatggccggatattctcgcaacataatcattccagacgaagaagccttttgcagcagcagcacctcggcaaggtacaacataattgaacgcgcttggcgccttggcataaaaagatcatcatcgctagctctattactgtctacagcgtgagttatgcagtgtgagacgaaaattattctctttcccagtcgaagaaaccgccgacgcaaaaaccaatagacacatacgccatctcgaaggtgtgcggtgagaacattgcgagtggcttcgcgcgccgatgtggaatcgagtcgcgacatctatatcctgcgcattggcctcattgtggccccggaagagtaaagacaggctatgttccgatcatacgttgaaaatcctgagcgctgcatggctgagcatatatcgatgatcccgatctcgggttgccgttggggttcagatctttaacgctgtcaatgatgccattacgaattacgagaacttcctggcgcgggtagagagactgcccatcggtaatcagaaaaccaagttgcttgtgctagcgaagagcatcattggacgaagtattatgaatgaagagaaatcaattctgattcgtcatgttcgtaacaggggcccttgtctttcatacaaatgatcggggctagggctatgttagtaagcagatcacgcgccagttcccgatgacatcagcctcgcttccaggacaacgcttggccaaatcagggaggtgatattctctccacgttgcagcggtatgttctggcctgtctttttcaagttcaaatacgaggtccgcgctgtcatatgcgacctggaacaaaggatgcaaggacgcaaggccctctaattcaccggatggaaaaaggcacctatgccgctagtaaacaagtttttctccgtggcgcaatgaagcgggctatgatcctggctatgaggctagaaatgttcggcaagcgggttgcttaccatttagccgtggctttttaccgagatactttcaatatcttgcccctgaacctcatctgggaggtttaaggtgagacgttgagacgttgaaataagttcgtcagatggtggaacctggaggccacgacttgacaggtcacacaatatggctactcatgagatctggagagatttggcgagagaaaaagagagctccaatcatgaagtcgcgggctgggaagcgaatccttttgtttttttgatctctcactactattaccacatacagcatacattacacccacatactttctattatgaattcatatcatacgttacttctatccttacggggagtctgcacaagtccggggtaccccgatcgtccccgcatgcaatatacggccccagcttcatttcctttgcttctttgtccttttttagtattttttctttatttctttcatttctttttcagggctgggtctcccccaagttccccccccttagattctcctatattccacctcacccgcatccacttacacctacgacacacgtcatgctattctcctaatactgactcaacgccatgggcgatttcaccgccgccggggatggcatcagcggtcactaccagggcacctccctaggcatgcagatcgccatcgcaactcttgctggtatcacttggtacaatgccttcgagctaatgatcctcctctttgtcaccttcgcagaatatcgaggactctacttttggagtttatttatttcctcctccgctggtctacttccttactcgctgggcttcatgctcaaatttttcaaaatcaccgagcatcttccatggctccctgtcactttgctcacaattggatggtggtccatggtcaccggccagtctgttgtcctgtactcgcgcctacacttagtcctatcaaaccagcgagtcctgcgtcgcgtgttgaccatgatcgtgatcaacgcaatcatcctccatcttcccactacggtcctcacctacggtaccaacatggctagcgacgccaccctgggctcgtggacgaaaggctacaatataatggaaaagatccaaatgacaggcttttgcctgcaggaattcatcatttcagggctatatatctgggaaacggtacgcatgctacgcctagacccggaccgtaccaagcgcaagattcagtaccaactactggtcatcaacttcatcatcatcattttggacttgggcctgctcgtcgccgagtacttggacttctacatcatggaaaccatgctcaaaggagccatatacagcatcaagctaaagcttgaatttgccgtccttggtaaactcattcacttggtacacaatcacgtctggaaacccgaatcgttctctgcgccaagcgaactccccgattttgtcgacgcaagccgtgtaacctccgatgtgacccgtgccgtccctggtgtcgttcaacgcaggccttcccggatggaagctgatgacatttctatcgccttgttcgaacatttaccggccgaacgcatacgaaccaattccggctcatggagcaatgaagcccgcgcttatcatgtggatcaccttccgatcgactttaccaattctctctgccattatccgcgtcaccaaagtcgtcgcggacttctcgagaaaccgggatgagaataaatcctgtcacggcaatatcctccgccttctttttttatgaatcgcggttcatgagatacgatcttcattctccgtgaacatcacacatggatcagtcttcaaactggtctcaccctcgacatctccgaggaaactcaaacttccctgatccaaatatcaggcctcgcgcccagctccaggattcacccagcgttgctgtgccacagagccagtaacttccttaatggagaatccataaatacgcaactcagagagtgtagatgtgtattcatctttatttgtatataaacgattccctgtagttatgtcgattgcacactcattctctctttcgaatatacagaccaccttcggttctgtgtgaatttatatcgctcttcggtcgtggcttccgtattactctgagtattcgtgcaaacaatattttgaattggggcgcgctataggccaatatggcaggctttccgagtatgtatatgttaacagtttcatatagctgcatacagattcctaatgatatcttcaatttggagcctactaaatattatggtctaaaactctccgggttggatttccatggatagaaagaactttagccccgataagcttactttggatagttccagggttcggatggttatagcttgagttttaaattgccgatgttccaaggttggatattcttaagtgaacgcttcttgactccagagatcctatgcccttccctaatatcatcataaatcaaatggattagactatcaaagtcagagaccgcctaagcaagcacatgcacttggagaatctagtcaaaggtatgttatatgtctcaaccgcaatataaatcaacaaatgcccgtcgatacaatgatacacgcacaacacaattcaaaagatggatggaaacgaaacagctcataaatcgtacatagaaaaaggagctagaggccaggtttctcctaccaccagactcaagacctcaaagtcccgaggctcgaacgcttaatctcgaatgctcgagacccctcaatcaacccatcagagaacttggtcacagccacccacgccggactgaactgtcttacctcgtcgagagcggggatgaggccgattcggttattgtcgctccatagacatgtaatgcggcccgtgatggaggaattgccatcggcctcggacgactcatgctttgagaaatcgacatcaacagtccacttgttgtcccatgtacgactccacagttggatccggctcagaccatctggggacggatttatgaagcgttggtctggagcggaggagccaaccacactaaagtctgtgatataattgccgtccatgttgatacggcagttacgcgtgttttggcctgatacttcaaagcgaacagatgaactgtccgattgagggtgggaaatgttgaaggaaatccagtccggcgacagctcggaagcctcgagtagagagtcggcaccctcgtttggaagcgatagagattcaggactggggacaacatgtggtattggtgcattccaggagcatcgctgaactcggttgctgcctcggaaaatccaatcacaggcctcattttggcctgctgcgctggggagcccgtaggtaacttccttgacaaatggaggcatgccagtcagcgaagcagtagacatcccattgtcgaggtcgacctcctgcaggaagaacagtttcaggcgattggagtctgcgaacgggaaggcgacaaggttgtagatcaaggttccgatgaaaacaaagagtaagaagataggcaggtggtatgtgtaacggtggataaatggcagaataggtgcaaataaaagtacggtaagactggaaataaagagataaacaatcagctgggggttaccatcctgaccagtttggctgagggcgctggtaatcagaagagccagcggcacgatcagcatgagaatcacgggagctgtgataagcagctgtaacagccacgtccatcgcggcaacacgccactccacccctgctcgtcctcatacacgtttggatctttctcttcatcctcttcgtcctgttcatgagatccgcggtctaccccaacgcggacgtagttggcaaaggtggggcggtgccggccatgcaagagcgatgttgattcagtcaagtcctcttcagtatcatcgtcctggtcctcatcgcctgacgtagcaagccggcttccctgagtactaggccgtcgtgattcaaataatctagcagcgtattctgacttggttggcagagagaacaactccaaataggagatccatgtagccaagaaggtaccggcaaagtaaaagaacatgaaatagccaccagcgagcccttcctcgtgttcataaacggtgccaactaccatgagagaccaggtaagaacaaacatccaagtccaggtatagactcgatgaaaagctgatgggcgtgcaaagtctgcgatgcgagatacaaaccaagctaagaatatccaagctgagatcatcatactccatacggcgtatgagctgctatgggcaataaaagggttgacttttgtaaccatataagccaagccgacagtcaccgctgtaggaattaagagcaaaaacgggaaccggaagaaaccacgcagaccacgcaacgggatattgtcgtcgttgatctcggaatacaccgatgagcggaagagatacatcttatcagccctcgaaagaatgatactggtgataagtaatgtcaacggcgccacaatcagcagtgtgacagacaacgcaaagagtgtgtgcagacggaagatggcaaaagcactcccaaacagatcgaaccaaacagcccgggtacctgagccgctaggcacatttccatcgtcgcggagatgtccgtcgaatcgatcagtagcgtcagacaaaagctcctccgtcgtagcaacagcagtagagagcatgtgccaaagcgagtcgatattagtgtgtcgagcatcatcctgatcggtatgataacgagctcttggttcaaagaaagcgacatccaaaccgcgcaggcccaagataccttccaggacgatgtaatccgtctggctgccaatcaaacccttttcgaacccgttggcactcaacactgagccgaatgggtgctgtgatttcgcatacgcctgggtgacctccgtatccgagctgcggaataatgtagcacgccctccagcacccgcaccttccaggttcaggaatgtgtgtgcaaatagcgccatcggatgctgactgtacgcgcgtgcgccgttcagatagtcctcctcgccattgttgaaaagaaccaccaacccgcggcgcggcgcatggcccggcgtcaggaagtatttcaccagctgcaggcacgttacgacaccaactccatcgtctgtcgctccgtacccggtcgaaacgctatcgtagtgcgcgttgacaagtactcctcccttgccaacgggcactcgtccgggagtctcccaccaattctgcttactatcttccgagccgcgaatgtagaccaagatattggtgccttcaaagtaaacaccgacgcttttatcgatgaaagtcaggttagataccagatcgtcgaaaacaaaaacatcgggcttctcttccttcgcgtcgcggtattcctcggtggatgcggcggactgcttgatcgcgtcgatgcgttcgagcaaccacgagcggaccacgtcattctggtgcgaattgtaggggtgaaagcctgttgtcaggctttggagatcttgccatgcctctgtgaggttaaggccgttggggcttgtttggggcgcgggcgggacaatgtggtggatcaccagcaatgggataatcaaggcgaggtatacgaccgtggtgatgattgttactggccacggcgtaaatgccagaggatttctggccttctgggtagccataccctgtgctgttcaagctaagaatgaatgggtggtggaggttgaagttggagtcgaatttaaggcaaatgcgggggtggtaccgtcattactttacataactagctcatacatccgtttatgtacatgtgcagatcggctgcacaagtcgtgctactaacaacaactgcagtcattgatctgggaaatgagtgaaagaaagagatttggctaaattctatgcgattacacattgacgaaaaaataacccaagtccgtaaccgctagcgtactaatgcatttcccgcaataacacagaatgaaggataaggtgatctttactcatatgggtagagatatgtctgcctgtttgatctagctaaagatcatggatgaaagaagacagggaattgaataaaaggaagaaatgaaatgcgagagcctagggcctgggcttattttcgactgcaaagaaaggggtatcgtatcaagtattcaaagtcccaacgtcgatataatcatcatctccgtcgttgataacggttgcgttcatcagcccagtcatttggccttcatcttcatccagttcttcgtcgtcatcgtacatcgtggcttcggcttcttcttgatattgtggttcactttggttcaggtaatcccggagtcgattgacaccatcaccgctgaacacacagaagacgtcccgttgttgttgcgtgaactctgggggggcttctcggcagaatgcagtgaggttttctcgcaagaactcttggacgccggtcaaactcaaatgggtcaggcgtgggcagctattcagcaaagcgtgaataccctaagccgtaatgtcagtattgcatatcgtgtacatcaggaccttcgatcaagacttaccttcattctcaactgaacgcaataacttagatgaacacgctctaaactactgacagaaggatgatggcccatcttgggccgtgccaacgctaaaatactctgatcagtgatagcctgacatttgacgagcccgattcttcggagcttcggcaaggttgccaattgctgcacactaaggtctgtgaggaggttacagcaggccaggtcgatgtatcgaatgcggttgcaagacttgaccaggtttatcacggccgagtcggagatgtttgaacagtggcccaggtgcacatagtgaaggttctttcctagcctgcagatagccatcacagatcgatctgtgataaatcggcatttggccagtacgagattccgcaaacgaggagctgcacgcacgatccgctcaaccgagtcatccctgacattctcgcaagcggtgagatcgaggatgcgaagactgtcaaaggtcatttgcggaggtagcgacatgaacgcactgtcgtcgatttcggtgcattgtgcaagccgcagttctcggagataccggagtgttgtgagcaacggggtcactgataagctagtgacaagtttgcaatcatgcaagtcaatttccagtatagacgggcagttctcggcaaaggactgaattgcccgatctgatacattagaaaccccgttgagtttcaactattacaattagcgtttgcagtccaacaagatcccacatataatcatacccttttgatttgacgacacttttgcgatacaacaagcaaagcgtcgtcggtgacttttgaacatcccgtgatgttcaggccttgcagacggggacagtctctggaaaccgtggcgagcgtgtggtctgtaaggtgtcgcaattctgaaacatccagcgcctgcaaatgtcggttcccttccaccaagtccgacacacccttatccgtcaagttcttgcagcttgtcaacgtcagccgctcaatgcgcttgcactgattgaaagagacgatagttccatcgctaacatcatcggacagagcagacagattcagtctcttgataaggtctgcgtagttgaaaagactgtccggttttcccaacgacgtagttacgcttctcacattgctccaggtgttacaagtcggtcggtgccacagtatccctacagagtttgcagcccatccgcgacacaccagcatggaattgagcatatctaagggcgcaaccaatttcgagaaaatcgcgatcagaatctcgggtgggaggcgaccgatcggcggcagtggctgggatgtttcacttgacaaacgagaatcgcggaaattggcgacaccgatggaggattgcgagtcgttggcctgggccatgaagaaatcggtgtcatcatcggcgacacgttcgggtgacgtcgatccagacgtttcggaaggggctgcactcgagcaccgaccgtcttctcgtagtcgatgcatcttagtcggcgtagattcgctttttgaggttcgcttcaatatgttttttgggtgtcggtaaggttgaaatctcataactcagggaactttgcatggacagtgcatgtgagactggaactggcaagtccggtccacagatgcagccagtctttgttcagtcaacggtcctaagactttgttttgtctgaagactggtagatgaatgtaattttcgggaaatatctgcagtaaggtgggtgcacgagggatgtaagcgtggtttcgcggcgcgtatttggatggcaaggggaggtggacaagtgcagatcgttcagaataaagttgaggcaagctagatcatggccccatgcaccccttgggtaagatgcaaatgcgtaaccaggaaaatcaatgcaagtaaatgtgaagggataaaagcggcgatggaggggggatgaggcaatggggccgggtttcacagtgctgtggagtcagtgccaagcactgcttatcgctcgataagatgggagatggggtctgaagttagtatagccagcccttttggttatggaacttgcatgtagactctttataaggattcgaatggcttattgaaccagttaatattagaagtattcaaggtcgcttgatgtgaccccgtgcttgatctacgatcggtttactcaatgcgggaataccggacatctgacctcattaggatgtagaggaagccctactttctttcagaacttttccgacatgtattcaaagtgatctaataatctacttataaatatatccatctcagtagtaatcttcgtctaagcttctctcgcacccttcacccagtcacgcaagacgttcttccggattttgccagtactggtcttaggtagttcagggaccacttccacttctcgaggaatcatgaacttgctgattccgctactatttcgagcccattcaatcaactctgagcctttcatgtgcttgccttcctttactgtaacaaaggctttaggtcgttcgccccagtgggagtcaggaacagaaacaaccccagcctccaaaatgtcaggatgcatgactagcatagactcaagtgcaacggaggagatgttttcgccgcctacgcattgttagcaatctagtttcatggcagttgtccgctcgccacacataccactaatgatgatatccttcgcacgatcgaggatctgaattgcaccatcgggatgccagacagccaagtctccggagtgcaaaacacctcctgcgaataatttccgagttgcctcggagtccttgtagtaccctcgggcacagatatttccaacaaaaacaatctcgccaatttccttgccatccttgcgaacatcaatgatggtcccttcgggcacttcggtcttaatgacccggcctggaaggcttgtaatgaagccgtggccttggcgggccatcttctggtatttctccttaagagcaagctcgttccattctggcaaatggtagcccttggtgattgggccgtatgtctccgtcattccataaacatgtaccggatgtaagttaaggtcggtcatttgttcgaagagaagaggtgtaggtgggcttgctgccaccgtgacgtggacaggctcgggcagtttctctgcttctttcgcgttgcaaagcaaagtgttcacagtcggtgcagcattgaaatgggtgatacgctcctctttcagcaacctccagatttcagggtagtctatcttgcgtaggcaataatgggttcctcgaacggccgtcaccgcccatgggaacgtccagcctatatgtataaataaaatgttagttatttagatccatttcgttactcaaatgaagatgatccacgaacccatagcatgaaacatgggtagcgtccatagataacgggcacgtccatcgtggtagttcagaccagtttcaatgatgtttgccattgtacccagataacagcctcgatgagtgaactcaacacccttgggacgggctgtagtcccactagtatacgccaacgcaattgtcgaatcttcatcggcagcttgactctcgagtccttcccagccatgagaacctgtatcgatatcgtgcctgaggccttccaaaacagcttcatcgaagggacctgtcagctcaccctctgttacatcggtgtcggtatcgatgataatatggatgtgagggtattgggatcgataatgctctagaagtggaacaaattcctcgtccacgatgatcacttccgcatcaccatgatcaaatatataagcaatgtcttcttgtttcagacgatagttgacagctataaatgtgttagtttgattgatctctctccccaaaagctaacaactagcttaccgatgttaacagcgccggctgcggcaattccgaaaatcgactcaaggaatgcgggagtattcgggcacagtatccccactctcttgaatccatgtttcttgaggtagtatgccataccccttgctcggtctgcagcctcgccatagctcctgcgaaggatcttattgttggcggttacatggtagatcgcctcagcctgtgcaactctttgttagattgaagtactacctatgtaccatctgaaaagtgcttacattaggttcaatggcagcagcccgaggaagaaagaaagtcggagatagcgtgtgggtattcacacggtgttcaatcgggggcgttgaacctgtgaaatggccaagcaggccagacaggcgagactttgagccagacatactacaccgtgagtgtagatttatggaaaaggggttgttaaacagaagagctatgtgtgatatcgacgaatgaagaggtaatgattggaattatacggggaacatcgtagagtcgggaaatgaaataccccaggaattccccaagttggggaaaatgcggggataccgctctaacctaggctatgcgcggggttattcgggtatcagcggcttggaaatggtttgatctacgttgtaccctcggcttcaatgaattacatattatggattggtctgtcggttgtggttgtgtggggacaagaccggcggtacggatccggagggaatcatccttaattttgggtggattacgttaattcatcttactcaggtatcactggtcagttagataatggatatatttaggacatgcggggatacacgtagggaagaggtgtgcatgctatactatgaatggtataaaaagtggtacgttacaggctatgaagtatatatataaaaaaaggataggtcaaagtattttttgatcataagaatcatgttgaactcttgaaaattgtttctttggattaaaccgccacggcgcgagtcaacggccagctattttgaacctttaatcccaatcgactccgtttttttcgacttttgaaaacttcgaagaccccagtccccgagccgtcatgtccgtcacagacagtggtattcatgagttagggaactgggctgcagaacaaggtcggccggcttgccgttcgaattcgctgaaagaaaaccgtccgcgattccatcccagaaccatcgctcgacacaacaaccagccgcgctaaaggtatctagtagccatactgagcaagctgggtcttggtcttgctgtccacattcgcaccctgctcggccttggcaaggacacgacgagcggccttcttgcgctcgtagtaagccttgctcttgacctttcggcgctcctcgagtctgtagaaatgttagaatttgtcgcttgacataaatcaccttcaattgataaatctgagattgtacatacctggaaacaacatcctggtacttccagccaacctcgtggctgagacggccaacggtgcagtacttgcggccgggacggagacgcaggacacggagggcctggggaacaacgacacgcttcttcttgtcgtaaggagggggaacaccctcgaagaccttaaggcgctccagagcggcggcaccacgggcggtcttgtggggcatcataccgcggatggccttgtagaggatacgggaaggagcgcggaagtggaagggaccaccacgggtggggttgaaacgagtcatcttgcgaaggtaggcgtggtacttgactgtagggcggaatttcgagtcagctctctgatatccaacttgcagtacatttcctctgaaagtaggcccaaaactgccatccaaaaactgccagtagtttcgatatgcgggtgttttccgtcgtgtcttccctccacactgattcacacagtccccaaatcacatagaacgcaaaggaaatattcgagaaggggttgaacgtacgcttcgcgcggaagaactcgccggagatgttgagggcctcacatctcacgacgacgatcttctgaccgttgagcagctgcttggcgacagtgctggccagacgaccgaggaggtgtcctttgccgtcgatgacgacctatttccaaacaattcaagtcagcgatagattcgatatgcacactttgcaggcgagagtggcggcactcaagtcgttgggtataaacgtaccactgattcaaaggaggacatcctggtgatcttatgtcccgtgggatggatgttgtcggcggttgttgtcgtgggtgtcaagtcgacgcacacaacgaagtcggatggctcgatgagaatgggctaagcgagggtccgctcactttgtgttaatggcgagggtcgcagccctaagcctgaccaatcatagaccgtaaaggtcacgtggtttgtctctcctgggtccgctcggcatcgtattacgtaatacttttatttctcactgtgcgccatcatggtgctcttttctttgtgccgttagggcattggcttagggctgatataccctgttcttgaaggttgctgtagatcaaatgataatcttcaagttgtaaggggggttggaggctttggtataattccaatattcggtgagattgttcacgttatactaatagacaacccgtggactatcaatcatctttgccttccacgtaaacctgtctgtgaagtagtatgtcttatcgtcttctcaattgtccgatctaatgatctagccaacttcaggtgggaacgttgggtccgatgactaagatatccatgaactcgtccacggacagatctcggccattgtttttcttttccccgaaagatctttcttctcacagaaataaccaaggccaacgagacttccactgggcctcatgttacactaatcttattcgcttacgattccatcccacactccaacttgattttacgatctgaggcaagggttctttctatactcgggtcatgcgacaaaagacgcgttttgtctgtgtctctgacacacacggatatacgccgtccgaagcgggcttcaagctaccagcaggggatgtcctgattcatgccggcgacttgacaaacaatggaagcctgaaagaactccgcaagacaatagattggatcagcaaggccgactttgaaatcaaaatcatagttggtggtcagtcatttaacttgttgtactggatataacccggcccttaatggcagtcatatcctcgctgctcgccaaattgcgtcattcattagcagggaaaggtcgattcagagcccctaacattttgaccaggcaaccacgatgtcaccttggacccggaattctacagagaacatggaaaaagattccatggccagcacctcgaagattcacaacactgcctcaaactcatcacggagtcgccttcggtcactctacttcgccatgagcccgctctgattcgtttaacgcgagcaggcggaccaaacacggtcttcaaaatctttgggtccccatactcccaatcccaaggaaattgggcattcggatacgaatcaaggaatgctgctgcgctgtggggtcagatgccaatcgatgcggatatcgtcgtcacgcatacgccaccacgatctcactgcgaccaaaagccgaatggaatgttcgtagggtgtgttgcgcttcgtagtgcattaagcctcatcaggccgcacttagctgtttgtggccatgtacatgaaggacgaggatacgaacgagttcgctggcgaggcaagcttactaacacagggacagagagagagacagagacagaaacacagctagaatctgattcagttgaccaagtcactcggggaattctgccacccatgggcagcaacaaacaaagcctagttgatttgactggcaaacgggatcaacgaatagacaacgaggggttttcgtatcccgggcaaagacagcatgatctagcagagactcaacccgtgtcatcagcatcaccagggtcagagtcatctgctagtattcttgaaatggcaggtccacggaactcgccgagcgctcatccgtccctgggtacgggtagccatggccccagtaaacgtggtttcgattacggcttgcaaacactaagaaaggagacctgcattgtcaacgccgctgtcgtgtccactagctggccgcaccagggaggcaaacggttcaattcgccgattgtagtcgatcttgaacttcccgtgtggcagggagaccacgcggtcgcgaataggtgaattgtttttccatagaatgaagcaaatttcggaaattacaattcagtcggccccatcgatcgtaacggcaatcttccctttgctttggccgtgcatggtggcttgacgccattctccctgatacatacagcaaccttgtgggctttggccctattgacaccggtagtcggacgccttgatgcatcatggttttaacattggtcggctagtgacttgatgcacgatgctaactgactagtgctgtcagattgtctccgcttacatcatttattaatttacgcgcattagcctcggtcaaagcaactcgaggataatctatactacgtactctataccgtagggatacctgtaacatattctaatattcgctaatttgatagaaataagaaaagaagaaatcaccgcaattcgctctcctctctaactacacaaacaccagacttgcctatgttgtaggtacccctcttgtctcgtgtataccccgcatgcaatggacaaacacatctgaccgatcgcaataacatcgagccatatgcacctgtgatatcacaactcgagttcttgattaacaccgtaagttcccaggtagtacgatatacacaagtcacctgcaacagagatctcctcaaactcaaaacttccagaaaccacagcgcttcgaaacgacttcttagtggccaactcccgggccgcaaagagcacagaaacatgagccgaccaatcaatagctcgacccgccctctccttgatacccgatgtgaccatgcgcggccgatcatgtattatcaatcaccggaggttgcctaagtgggagtctgtgtttgtgaccggttcttcagcagggatttgggactgggacagcgctcacactccaccctcgtgggaaacacatgcttctcgcaagggctgctgtttaggctggcgcattcttttccagaaggcgttgaatggctggacggagaggcctggccatatttttattctgtaccccctacgcaccatgtaatagccgagagtattattgcatgagaaggtagtactagacatcattattgcaggcgacttgcattgcatctgcattttcctgtttcccgggtacaagcctccaaccgtttcgagccaatggtgtataaagtgcattttagtacgtagtttgcatatctcgtacgttgtatgttgtatggctccgactgttcggtgcgattatcctgacgaaactacaaacacaccattaatccactgccaacgcccaatcgtggactcaccgacttcggtcctagtggggttgcgtgactgtcagggaggggtatctgtagatcacggtttaagcgtataaggttactaccctgtgtttcagagggaggcattgtgtgacctcgcgagcacaactgatgggatcggaggattatgggttcggctggtgcagtccggttggaaagagtgagagtccgtggtctagtcctggggatcgaccaaccccagaccgaggcaaggtatgctacaatcactatcacacaggaaactgtcaaatgacagagtcaggcagataagaataggagatacggagtatacaggtacaatattgaggcggaaatttgaggcggaaatttgaatggtgggtccttaggacaccttaatactaaatagaaaggtacaacatacatggcattcttagcaaaatgaagactatttaggcaatatagtcatagtaatatggcgtaactaccgagtacggaatatagagtagtaagataatgacatggtggtaatgctgacacggtgttcggtatttgcatttccaactttgtcacgatccgggctggcacatcagctccgttcaggctgtcagcaccggtctggaaaatgaatgcgctgcaaaaaccgcagtcccgggtctagatgatttggaaccaatggatgggccggaccgtccgagacaggggagtacgacgtagtttcatcgagtgtactgtaattgtctcatagtctagaaagtcagagtaatggttggaagatagggcccgaggtctcgggtgggggttcaacgacacgttgtctagttagtcaatgggcccgttgcgggacaagtgccagctgtgccagctgtaccagctgttttagcttaggggagattattgagattattgggtgcgaatgcctgaagagtccgttactgatgtaagatctagagatccccggtaataccgagggctgcattctgatataaggtgagaatcaaatatataccacatacagcatacatagttatatgaaacaatatctcactatatatagaaacaggcacattcttcagcgatggaacgcttcgggaaggtgggcattacaagtcaggcactgatttcgttacttatatctatggagtacagatacaacagtcaccacccaatcacacgtttcaggttaaacaagagagttagatatgactggctgaggtcgacaggctcaagacaaggcggaaaaagtttaaacagaaccaactcaagccggataaagcgaaagcagtgaggcgaccgaagctaaactggctaaaaacccgcaggcactagttggacgaaagtcggggatatgcaggagagactgaatcgagaagaagaagggattagcggcatgacgagttccaagagaaggcagacccgattcctatggaatcgagggatcatgtccctcgtgttatgtacttcatcgccccacgcagcaagccaaggtgctggtgaggcgttgattggtaggaatgcgagcaaatcggacgaagtgctcagaccaagtgaatgtcagtggggaagagaatgatttttttgtgattagatgattattctgacgagtagagggaattaggatattaggttgggcatccttgtctctgaacctcttttcgatgtctatgtgattctttataccgcgatattacatctcgaaataccgaccttctctttgtggcgcagtcactttcgcccctggcatatatcggttggctgggagcgagaacggacggcaacactgcggattttcattgtccaatttgtatggcaaatcgcccatccttttcacaattctcttcaattcctcctgcattgcaaatcatatccagtccattctggatcggtgtggaatttttgctacgtcaacgtcaggttgttgacattccatatcgcccaccgcctcttttctccccctctcccctcacctttttatctcctctcatcccattcaatctaaggcattgaaagcataccttgcccacaatgtcctcacccccagatatagacccatatgccgtgcttggtgtcgccaaggaagccaccatccctgaaatcagggccgctcaccgaaagcgggttctcaagtgccatccggacaagatccaagatgagtcgcagcgcattgctgcccaagatgaattccagaaagtccagcaagcctacgaactactctcggacgatgtccgacgcactaaacatgaccagaaggtcaagatagccgagctgaagcgggaactgttggaacgcagacgagcagacctgatgcacaactcctcgcggggaggtggatccgccaatcgcgaattccgcaatggtcacgtcgtggaggagagggccccaatggaatgcttcttcgaggaggcaatgcgattcacggacgatccacgacccatgtctcgcaaatttgaagagttcggcgtgcgcccaaagacgaagccgacagaagagaagaagaggactcgaacaccgatcaacatgtttcaccaagcgaaagaaatgcgggagacggtcaaagcgacacattccgaccgtgcgaagatgcgcgatcaggagcgacgacgacagaccgaggcaaagaagcatggcatctttgaagcctttgcaggatcggacgaggagacgtctgattctagcgctccccattacgttcacacgagacgtacttcaacaacgcgccgtgaacgcgaatcgcgacctcgaccatcggactcctctcgtcgtcgtggacgccactacgacgaggatggcaatgtctccgatcacttgcaatccaagatcgatagtcagtactatactgcggaggactacatcgcaagcaaagcccggggttcaaagtccccacgacagtaccatggtcacgacccggcggaaccagagtctgcttcgcgacccgcgggacggtccacccgcacccgccgtcattcttcgtcgcgcgagaattcctacgagcatttggattcgccacgaaactacgatggcaagccacccaagatgcaacactccgcgacttccccggggatcaagacgtctctccgtcctgcgttcctcaacactcggtccgcaaccacctctggcttcacccgcgcaaagcgggacagtcgcgactccacactatacgaaatggcccacgagccactgccatcgcggggttccaaagtgcgcgatcgcaacgactcgggctattccagtcccactactcccgaaatgctcccgagaggcgtttcccccaagacctccacccgctacaagatcgtcaaggaaccagaccacgtcgtcgtagaaccgaaatcatcaaagtaccgctcagcagcgagatcccccgaccgggatcgtgtaccccctacccgacaggtgcccaagcgaagcagtacctaccagaactacacttcggaaacctcgcctcggcttgagactcggtcttcgcggcctgcttctcgtccccatgcggacgtcgaatacatttctcgcccgaaagagaaggacatcaagtactcccggacatacagtcaagatgatgtcagttactcgccgagacgcgccccttactacgacgaggaatatcgtcctcctgccgtggggagacatcagtctgcctattaattcaaccatacgacccatgaaacatggacacatacgacaaatcacagctacaatatgctttacattttatttttaaacttttatctattatttcaatcttatcagcaagtcgcggcgtttccaattctccgcttttcgcatgtgtcggctgttccaccgaacatttgggagtacttagatttccattcgggctggtctggctgtccccgcgcagtcggagcaagagggcaggaccggggtatatctttgtcactgcccttggcgcattagggcgggcataggtggatggtgtgttgcatctgtcttgcctcaaaccctgcacttatggcgttatgaaattgtcttattgggttttacctacttctgactgcattctgcctgcattctgcttgctcccgttctcgtgttctttttccgcgatcttctcttctctatttttttatatatatacgttgtcgctcccgggcttcagatcccccgtggactaccaattggagaaatccaattcacgaattacgcttgttcacatgatatgatatgccataaccttgatcctttgttggtctctttgttttctctattcttgtcccgagtaagacggatatgttgggctgggctgggctgggctgggactggggccacagaaagtggcggggtaagcctcacaccggtttgtgcatggtgattggatcttctaagaatagactgttgatgtatttaggcatacctgttcgatcagtgcaaccttggaaatgttgataagactgcaactgccgacctgtgttatactattgggggctgttcagccttgttgggccgtcaaggctcaatacgaatttgattgtcacttccgcccccttaggaaccaactcaatacaacaagattttattctacccatccctggtcgtctaaagtcaagaagctgatacgtttttataggacatatattacatatattattatccagcacgacttggttgacctagatggccagatgcgacctggaatccaagagatgctgtctaaatctatcgatgaagatggccaatatcaatggtgagatgtaatgaagacaaagtctttctttctagatatctcgtcagtcaggcacatgactcacacgatttctactctcgtttgtttgaactatatgcttgttttatctctcaattctctggaaaccgatagactggatttgaggcatattgatgtatttacttctgttagactctttttccatggcataaataagattgttataacacactttttggaatagaagactagcttgctccttaaggccaccaggccaccgcaagtaattgagcttgttgtgtttcagacttgttctacgtttcatatattcacttatttagatttggtaatgatgatagaagcctcctaggagacaatcggatattacatcgagcctagctctatacgttaatctagggtgtaaggtgatgagtatctgacttggcgagtcttttgagtgtgatgtgcacgaattggccgactacttcctgccagcttgaccatggtcctccatggattaataacaggccatgctatcaagacttagtgatgtatccccatagtcttgtgagttcgcgactcatctcactacttttatgattcgtttcaatgagaaccatgatggactccgacgctcaagaggtttagggaggcagattggctatggcccggttactccagttttggtactactgagcggtttcctctcatacatgctccattatcaaatgctgtcgagtagtccatatgcgagcacatacgtattggtgcgacgagtttctatagcatactggttgcgcacggaccaactgcaccactgtgggttcacgggtatctgcagatcccccgcgatttgggaaaggaggcctggggttctatcgcctacaactagttgtacttgatgcactcagtaccatctaacttctctatttcagactctctttgctccgtcgtacaatgcgccagaatttccattctctccaaatggttattcacggtccctcggttgatctgagtgttggaatttcctcaggagtggcgccgactcgcataacattcgtagggatgcccatccttggaagtactacttcgtacaggaggccacataaactgccgacttgtcttcttgaggcggtactaacaaatggtatacttcattacatggtaatatcaatataaaatcacaatgcggaaatgaagataatcgaacctatatacaagaatgggagacacctagtagtggtatccatattaagagcaagtcgccagggttctaagccttccttggccgaatttacttgccgtgtctaggcgcatgcgcaccaaatgtccgtcttaaacaaggacgtagaatgcacacatctaaaaatcacacagggttagaactaaatatactggggtgttgcatattcagagtgaagaagtagggcttaccatagacagacccaatatcattgagaaccagaataccgcattctaggaaggaagtcagtgaaaatcgcagaatattaaagcaatcatataacagcttacattgaggattgtccggccacggaaaaagcgagacttttgaatcgcaacaataggcagctgaagcatcatagccaggaaaccgtatccccgaagcttcttggtaatgcagctcataactagctcgtggaatacagagctgaccaaaaatgtgataaacatagccacgggttgagagaagttagatcgggcaggccagtagacatggcggaagaggaagtgatggacagggacgttccactcgcgggaaaattccatcctatgtagaagccggttagtcatatcactcagactcttaggagcgtaatttcaacttaccagtcacaggaattccaccagtctgcatagaagtggcgatcggcgaaccgagtcagctctgcaaatgcacccagcacatattcgaagatgacgaggaatactagcaagaagataatcatgaaggggaagaggagcatgctgatggtttcagcaaggatgagagccttgtctgtgacgctagagacggcacggagttgggcgctggccactgacaacacggggacgatgaattcctcgcttgtcagggtgagcaggaagatgcagccaaatacagcagcggccttccagccaatttctgaccagcgtcgctcctttcggcggggatactctagctcatagcaaagagtcggacaaaagaggaagtccacataatttccaacgtgcagattctgcgggtatgagatgttgcctagcggggaggtcaactccgtggccaggtcttcacgcagtctctccaatggctctgcggactggtcttcgttgggcttcttcattgacggccgacgtcggtgtacctctggataatggatggcagcagggggctcaggtgactttaggcctggcttatcgagcgaggcaaggcggcgctctgtctcgctgagatgtccattatagaaagcgtatgagtgcagtttcatcagaatggtcagagtgtgcagcgtgaagaacacctgtgcagtccaggtccatttcatcatgaagggccagctgtttttctcatgtcagcgctctgagctccagcgcaaaaaccagctactaactcactttatccataaaaccaaccaaagtgcttcgcacaagctctgtaagagcatacctccgcgcgaccatcgcagccactgaggaccacttcgccacagttggtgcataggcaggacgagccctgagcttatcaccatggccgcatcgctgagccccatcccccacacattggccgtcaagagactccaaacgcgcacctgcagggggaatccggtatccttgatattgcgcaagatgctggtcccgaccatgatggccaagccaatccaaaagagagtgaagaaccctcggaagttgtgatagtcgctatcgggatcaaaatgtgacacacgaggcacatagtctattgtataaaacaggccattgcgggcgcggacttgcttcctcgcggatgagatcgaatgcgctgacgggggagcatcttcggaaataggggttgagtggccactaatgtgacaaacagattagctatttagatccagtctggtgcaagttgagagcaaattaccttatatcctgaatcagcttgtccactggaagagggtgcgccacgtcggacttcccattcggctgtatcggcacggcgcgcggccgcagagctgcagactcatcctgtgagacggcgctagacatcctatatggacacaaatgcaggagcagggcgtttgcacatcgaaggcactgagatggaaacttaggaacagctatgattgtgggtcaggactcaggactgtttgagtttgtttggattcgaaaccaaaaacacgggccgctacgtcagactgcctttatatgagactatgtacgttattacatacatgtgagctaggcagaagtatttagatataaattgttgaattgttgacatgtttacatagaatctgtagtatctttactttgatacaagccagctatagtcttttctcttgggataagtatgcatttagatagctatactgtcctttagttatactccctactatgtacataactatgcatgtattgtaatttcaaaaatctgccacttatgtcatggttctgcctcaggtgtatattcaaaggcggtgtaactgattagtaccaaagagtcaggtgatccagggtaaccaagctagtccgtttacatactagtgctctatgccaagatgccaggtcgactgccatgaggaataataatacaacagtccagacctccagaccacggccttgatacttcttcatttcattggttttataagcgcggtgcttgcttcaccttcttgcgcctgactctgtcccttgtcgtccattgaatatctctcttcctcgccccgtcgggggtccctctcgccgccatgtcttcccgtaagtgctgcccgccgcccctcctctcccctgagatgcaggctgaccacccaattcaatatttctacagtcaagcaattcatccgtaatgtccgatcagcaaaaaccatcgccgatgaacgtgccgtcatccaaaaagaaagcgccgctattcgcgcctcgtttcgagaagagagtcatgactccagcatccggtaagcttcagcatctacctcaatcgagtactcgatcggcctctaacaattgataggaggaataatgtcgccaagctcttgtatctgtttactcttggagagcggactcacttcggccaaatcgagtgtctgaaactactcgcctcacaccgattcgctgacaagcggttggggtatctggggaccatgctgttgctagatgagaaccaagaagtgttgacacttgtgaccaattctttgaaaaagtaagtctccctgtagtacttgactgaccctgcgctaactaaatgcagtgaccttaaccactccaaccaatatatcgttggtctcgctctctgtaccctcggaaacattgcctcggttgaaatgtctcgtgatctgttccccgaagtcgaaagccttatgtcgaccgccaacccctatattcgacggaaagcagcgatctgtgccatgcggatatgtcgcaaggttccagacttgcacgagcacttcctcgagaaagctaagaacctgttgtcggaccggaaccatggcgttcttctctgtggactgacactagcgattgatctatgtgaagcggaagaagaggaagacgaggaaggaggaccagtcggcgtgatcgaaatgttccggccgctggctggaggactggttcgcgctttgaaggggctgactacttccgggtatgctcctgagcatgatgtgtccggtatcacagatcctttcctccaagtcaagatccttcgcttcttgcgtgtattgggtcggggagatgtggccaccagcgaattgatcaacgatattctggcccaggtggcctccaatacggattcctcgaagaacgttggcaactctattctatatgaggccgtgcttacgattctggatattgaagccgattctggtctgagagtgctaggcgtcaacatccttggcaaattcttggctaacaaggacaataacatccgttacgttgcgttgaacaccctgaataaggttgttgcaattgaaccaaatgcagtgcagagacatcgcaacacgatcttggaatgcctgcgtgatcctgatattagcattcgccggcgagcgctcgatctcagcttcatgttgatcaacgaagacaatgtgcgtgtgctagtgcgggaattgctggccttcctggaggtggccgacaacgaattcaagtccgtgatgaccacacagataggcatcgcggctgatcggttcgcacccaacaagcgctggcacatggacaccattttgcgggttcttaagctggctgggaattacgtcaaagaacagatcctgtcttcattcgtccgtctcattgcgactacccctgatctgcaaacctacgcggtacaaaagctctactcctcattgaaggaggacatctcacaagaaggtctcacgctggctgcgacatggaccattggtgaatatgccgatagcctactccagggtggtcagtacgaggaagaagaactggtcaaggaggttcgggagagtgatcttgtcgacctcttcaccaacattctcaacagcacctacgcctctcagattgctgtcgaatacatcattactgcagccatgaagcttactgtgcgcatgtcggatcccgctcaaattgaacgcattcgccgtttactttccagccggaccgcagacctaagtgtagaaattcaacagcgtgccgttgaatacaccaaccttttcggttacgatcaaatccgccgtggcgtgctcgagcgcatgcccgcgcctgagatccgcgaggaacaacgggtactaggtgctgcttccactactaagaaacgtcagagtaagcttctccgtgggaaatcgaccacaaaggtcgccaaacctgcagagcatgacctgctccttgacctggttggcggagacgctcctgtcacgagccctacctccaatggatcgaacaccgccgatctgctggcagacattcttggcggagactcgggcatgtcatctccctcgccggggcctgctggccaaaagaattccaacagcgccatcatggacctgtttggctccaacggtccttcgcctcaacccacacaacccgcatccgcctcgatggatctgctaggtgcaggaggcttgggtgcctctgcgccctcaccctccggctctcccgcgcctgtcactgcttcgacccctgcacacaccgcgctcaacaaggacggtctcgtccttaccttgcaggttcagcgaagcggtgccaacgcccagatcctggcccgcttccgcaacgatgccagcttcggccgattcactagcgtcggcttgcaggccgccgtgccaaagagccagcggttgcagctgagcgcaatcagcaaggctgatttagatgccggcgacgaaggcacacaacaaatgcgtgtgaccgctttgaacggggtatgtctagatctccttcctattctacattcttaagtctcgcactaaccgattatctccagggccttcctgccaaacttcgtctccgtcttcgtgtcacttctgctcgcgacggcggaaaccctgtcaccgaccaagtggactggtccgagccgtagatcaaatcggtggcagcgatgctaaaagtccatccgaacgaatgtttaattttcccatgaacagttaaatccacttctatacaccccggttatcgtgcaccttcttcgcttttgctatttatctagaattttgttttgccattgatttccttttctcctgtacttcgtttcactacttggagggagggaatgttcttattgtacatgcttcagatgaaagttttagcgtatgagaaagtgcagggtgtattcgcttcgagccgatatcctagcttactagtagtgtgttcctacatgtatgtacacatcagatactaatagatgttaaagtgcattgtgacacctataacgcagactaaatccaaaacatagaacgcaatggaatgaataggcgataaaagcaaggctctatgaccttcaaaagagaacccagatcaactgcagcctccgcatgagaagaaacaaaaatcaatatataatacccaggaaacaaacaatgaactccaccgcaggaaaccaaggaatgcaaagtcatatgatttatccaaaatccaaagcgtgagtccaatctataaggtagaaccggaatataccaagcaccagaatggtatataatatggagagcaggtctaagacaagtagccaagctaatcagatatgctcaatggggccttcgggaagtagcacctctccctctctccggtcaccgggcaaacaagccttgagcggaggacggacgatgtcattgaacatgaaagttccatagacaagaagcgcgaatccggcaacttggagccatttgaaggtctcccagccgagtccaagcgagacaatccagatgaagagtgtgcggcaggtgtcgattgtgctacgagaggtagcagacacagtgcgggtgacagacagaccgaagaagttgaagccactagaacgaacgttagaggggagggcggaaaaatggagttgagaagcaagatcaacacatacccgatactgatcatgataaacaagctggatatggcaacagcacggttattaagaacctcgtgcaatccctgcttgacatcaaagtagccatatcggccggcatcggtccgtccgacagcaagatacatgatcaccatgccaacgacagtaaccaaaaatccgaacacaccttcccaacccacaacatggatcggttccatggcgtaattctccaaaatccactcctccaacacaaattgtgtggctgtgaagatctgcgctgcggcaataagcagcacaccaatgatagcctggacagcctcgggggtccgagcaacgacacgcgcctgcataagaccatgcgagactgcattgctagcactcccatcctgagtgatatcgtggtctgaatctccactgaatagagctccggaaagacccacaatagccacacctagaacgacaatgaagagtgcactccactggtataagtggagcttgcggcgaaggaagaggacactgaacaggcctacaaatagaaccagggcaccccgggtcatctggtagatactggctgccacaaagagaagacccacgttcatgagggttgtgccggcgatatcgcagctagatggcgctgcaagaagtaggatcttccatccgcggagtgggatgcggctgtcatcttcgggtaggggcttggggtgtctgctatcgctgtcgagttcatcgactatgttgtcatcctcatgatcgatgccttcatcatcgccgtttatcgggtgatatccgccagttaggaggggtgaggggtcactggataggcgcggtgcgatgtattggcggtagaggaaggttaagccgacaactagccaacagcccatttcacccataaacattacggctctgcattaccgcctggtgtcagcattaatcgctagcgttgtaaggctgtatcatcggcacggggtggagcctacgtctgaatgactggctgctcgaacagctttcgctggctgggatctggggaatcgcagtttcgcacacattgcatatcctttttgagacgggccaatcaattagttcgtgtttctttgtagcttgaatcgaatcaaggacgcacctgatacttgttgagaatggtgttgcacaccccagtcacgagcatcatcgtgaccaggaggggaatgagggcatggttcgccatcttgtcccactaaaatagaactggttgatagaagttactccaagagttaggaagatggatgaagtgatcggagggtcagtgaggagacaaagcggaggtgagcttatctgagcttggtggctgatagcatttgtcacggtacccacaaggtactgtacccgccgacatgacttcatgtttggcttcatttggcacatacaatgtacgtatacatatgtagtacaacatgtccttgatattactctctagtgctacatagtatgtatagaatcctggttttccaaaaagaattatgaaattcaaaataaatgatccagttgagaacctctccaggttctttctccaaacgccatcgctgaggccaatggacaacacaaaaaagtccagaaatgattagaaccccaaaaggtcaatccctaaggatcacaagaaattaaccaagattcctgcgtggtagtgtacaaagcatcgctcctgagccatatatacgctagaaacgaattcgccgaaataaaatgtttcataaactcaagtccatcttcatgtaggacttagcactgtgtacatgctctcaattagacaagaaacatttcactttcttcaagtcatttggatgggaatgccttccctctcgtagcgcgcaacagcatcccagtcaacctcaagttggcccataggtccgatacccttgacctggatctcaggcgggatgcggatccactctgcggcccttgcaatggactcatcgtcccaaggttcataaaacttctccaggaaagcagcctcttcggcctcgtctgggggagtcagactagcaaaggcaacccagtcatcatccaccggagtagcttcattgatatcgaagtcctcgagcgagtcatagccaaggtgaggcagatccttgctcgcgaggttcgaaaaggtatcatggattgtatcaagtgaggtggggcactccgcccagggatcctttgtgtcgctatcatctagtttgataacatccttcttttcatctttgccagcaggctttgttcccttgacagtggacaactgcggagtgagcagctgagttgatgctgcagcaggagacgcagtcttggctccgaattggctagtgatcctagccatgggcgtgttgttggcaatgagaggggtagccatactttgttttaccggagaagctgctgcactaagcttggtggagggcggcactgatccgagcgtggctatctgctgggcttccgggctgtcgtcggggttcaacccaagacccatcgaaatactttcatggtaatatttgagataatcctcgatcatctcttcttcctcgggttgatggctttcttcgatgtgcttatccaagacggcttgcgtagggaatccttgatagtgatgttggcattcaaccacactgcatttgaaagcacctgccatggctgcagcattagatgtggcgtccgccaccgctttgttgtattttgccgctgcgccaggggctgcagttgcttgaatcggggacgatgccacgccatgagactgcttccgctttttggggggaggcagtttaaggttctcgggtgcaagtccacctggggcatactgagggacgcccctaggagatggggctgcaaaaggtgcagctggggcatttgcaacagactgggtagaggcgcgccgggctcgctgcagggcttcttcctgtgcctgcaactgctgcaggttggtcgcgttcagtgctggcatgttgccttgcattgcctgggcgttggaggtaggaggttgggaggcgttaggacgctgaccctgttgttgcatgcgagaaatcatcactgcgaacaactttcgcataaaaaggacagcaccagtgaggtaatcgggagtcactgtaaaatggtcatttacaacccaatcctgcgagggcttgaactgcctcatcaattggatacgctaagtaaaatcagattagtaaacaaacgatcatgatatcaagggggagcttaccatagcgaggaggttcttaacattcttctcctggccatgcatctttgcaaaccattgtacaagggcatctaagcggccgagaacatccaaggcttcacgcagttgtttagtcatggcggccttctgttcgggcgagacgggtataggtttcgcgggtggagcgttcttggcgatgtcattataaacctccataacttgggccggtaggttcctgttccatgcctcgtcggcggcagctctgctgagtacctggccccggctttgagactgttgcctccgcatgtgtgcctcaacctgagctcgctgttgaggagtcatttgtgcaagatgttcctgtgtgaaagggagacctggccgttggggggtcgtgcctggagcgcctggaactgccacaggctggctcatctggggcgtagctgtagctcgagcttctgccggatcatctgcgttgggtctcttctttgaggcttgcttcccggtagcacccttggcacctttagccgcggctgcagtttgagtctttgcgttcgccgcttgaggggtcgtttgcggcggttgaggatgctgtggcttgatttgggggacaggctgtactgcagggaccggaggttgagtgaccgccggttgatttagctgacctgggtgcgcgtttccatcaagttgcattgctctgttctgtgcagcctgcatcatctgcttttggcggtttcggtacagaatctcccgaatctgctcatcagtaaaggttgacgcctggggtccaagcttttgacgagccattgaaatgtcttgcgcggagattggccgcatggctgccatattcatagcagcggcttgttgaccaggagggaagcctggcgcattagtaaacggagccggagtgccttggaatggagttggcgctggaccctggccattcctcacttgattcgcagaagctgagatcatttggccaagatgaagtttctggagcatcatgagacgcgggaggtcgttggggcttgcaatttgagggttcgaatttgcccattgcttgagttggccccatgatttaacattgttagggacttgcatcgaagtgccattcatgttcagaatagacggtgggaaagatatgcggtccatttgcttggcctgctcaggggtcatctccacgccattgttttgctgccgcagcagttggagcttataaacttcgttttggcgttgttgacgttgcagctgagtcatttgctggccttgaggtattcccgagttcatatcctgcggggcacccatcgagcctctcatcatggcgttgcccatctggttattcatcattgcttgggcttggcccggttgatgttgcggttgctggccggggttggctcgagccatattattgagagcggcacgacgttgctgcatgataatagcccgagcctgttcaggaggcatacgagcgagttgttcctggatgtggggcggaatattgggaggcatttggacctgaccttgcatcgcagcctgtccagcaacgccagccgggtgctggcccatgtttgcaggtcgggacggtggtcgggcttgcgggggcacctgtaccggagacatctgacccggggccatgggttgattcagcataggcatgacggggctttgtccattcagttgtggctgtgattggggggtcacttggccaccatgacccgacatcgccatctgcgccttctgcgccgcttgtgcgcgcgcttgagcctgagactgtgcctggaactgcattcgatcctggggagcattgggcccaccctgcatatgctgttgctgggcaaggaactgagcctgggcgtttggattattggcgttcattgtcggctggccattctggcccatctgctgtgggaacatgttgttgttattattcgggaatggggcctggttcatttgagaagagcttgcaggaacgactagctgaccagcctcctgtgagcgcaggccatctgcttgctgtccttggatgttttccacattgccaatgaagttcgggggttccatcgtctgaccgggatttcccggaaatgcggaattgcgttgaaggtttaacatgttttgaagcatctgtcgctggtgttgagaattcatcatgggatctcccatcatgttaccattcgcatccaccccgccatttggcccacgtccccccatttctaaacgagcgcgacgatggcgtctgatctggttgagagcctgagagcggaagaaataggtcattggctcaagattcttccgtgccagatattgccgctgctcgggtgtcatgtttgataggttcattttgatcttctccatatcttccgggctggttttattcaacatctcgtttgctagtcgagagacatggtcaaggtcttgggctgaaagggtgctgaggtcgtcgaccatgggaattccattgccagggcgctgttggggtcgctgctgctgttgttgttgctgctgctgctgttgttgctgctgctggtggagcatcgcctgcgactgctgttgctgtcgctgttgctgcattgctgcctgctggttctgcccattcatgcccattgccatctgctgttggccagaaaccggggatgcctgcatctgattcatgtgctgcggaaaagcgcctggaatttgattctgaccagcgcccgtctgggacatcattccactttggtaagcgaccgcagcctgtctctctcgtgtgttccttatgtgaagaagcttttccgtgcattccttctcatattcgatcttctcgttggctttggtgaatgcttttaattcgaaactcatggccgcctgggccgcttggtggagatcgatgcgaggttggatcaaacggagggaggtgatcctaattcatgcaacggttaggccagataagagtgaacgcgcgaagccagttttcacaggcagaaggtgcaacttacatttgataaacattggtcgcccgggtcttgattagaacctctgccttccatcctccgtacggtccctgattttgcaacatttgcgcaacataggtcatcatagcttgcacactgtcgttctttgggacctgcatgtttggattcattctcatcgcagtattcggggctggccggccaggccccgcgcccgggttggggaactctccgggattcatagcggacaccccatcaatggtggacgggcaatccgcgaagaggttccgtgaaggttagcattcgctggagtaccatgcgcaactgtgacgatatcgcaaggttagtgagaagacgcaagtacggtgttcaacacgggtcgctgatcagcgggagaaaaaaaaggtaggtgctggtgtggaaccgtgattcgagtcgatcagggagggtggggatgggtggaaaatgaacgaaacggaggacaggagggactggagggaaccaacaccaacgtaatgaggagagcaaggcttccgggcaccagcgtcagatggattcaattcgctggccagcacctgattgtggcttggagcgaatgatagcagtttgtaggggagatgggatccgtgacagggatcatacagctttcaagtcgcaccgggcctcagttgctgtcctcactacacaatggcaagaagattcggggggagagaaagaacacaagtacttaccgagaatcagaatgccactaggacaaagagatgagtgcacagatcttaaagctagagggggggcaaagagtgaagtggcggtcgagtgaaggatattattctggtatggttattcagcgtattattcgcaaatgaatgagaagtgacgagaaggaaataaaggaaggactatgttttattcggccatcatcccattgagggtttgggcttacaacataagatgaagaataatagaactgactggggcgtgtatcaataggccggtatcttattcgtattgggcggagagtcacaaggctggctcggaggtacttgcagtttgcctgggtgtgcactgttgacccaggtatcccgaaaatacagtgtggttttttacctgtactgcaaatacatcactgccaatcctgatgatccaggccgttaagtacctgaaggctcaaaacaagtcgtcatcatggtgtggatcttaaataatgcccgatattgtacccatcatagataattacggggtatatgagggtgcataaaataaccccgtggatgtatatgctgtagacgaaaatgagaattcctctttattcaattaattattcacaaagctctttgcccaaggaaaataactagggaacagtttccatcaggatcgacaagggcgttctggccctgacctgatccggacgaaccaattggtcaaaatccagaaacaacaggaggctgtggctgggtaccaggtactccactatacacttgagcacacgaccaaagcaaagtcttcagtactacccggggacggtgacactgttagtcagagcttaagtcagccactctcctggccccgaaacgtcgaccccccatggcctgttctatatatacacttctgcctttcaccaacttacattcagtcgcctctttcatctgcgccctagatatctcgccatgaaaaacgactgaaacttgcttgtttttctcttatcggctttcgctgtttcttcagcatgtttcccttatctgtgtcgcccatctcggtgggttcgaacgtctttttcgcatttgccctcttcctcatctccgcacttgtgttacttctcctgcgacggtttctcaccctccgggccacccccgcgtatttaattgtccctatattcctagctctagctctgccagctagtgttgtgcttttggtccccatcgatttagcatccagttcgcgggatggatccggtcccaaagcaatctggctaccggaacgaatggttttggtctgctggcgcattgcctactggttaatctttgttctcacctggtaagtgtactgcgctcttcataaccaatggctgtcactcattcttatctctcttccagggttatcctcccattactcggtgaatatgtcgactcgggctaccgtgaaccgaaaggccggcttatgtactctctccgatcgaacgccaaataccagatgattgttctgggatgtgctctggtagggttgatctacgtttcaatctcgaatggcttcgaattcacatccatcaaaggtctcgtcatggcattggcatatgtgtggggtctcgtccttgccatttacctcatgggtcatgggcttgtttcgatcccgcgcaatctgctccgaaactccaatgtaagcggtcggctacgcagactccaggcccatgcgcccaaggtgcacgatcgcctgatggactcggtcaatgagttagcgaatctcaatggccaggtttcgcaactacaacgccgtaagacgggaaccgctcgtgacttccaggaatggattgaagagcttcgggaaggccacggccaatccgacgtgcgcgccccgatcctcgagtcacccgatacatccgcaacgataccttctgtcatcacggaacgctatctggccgaccttacacggcggcttcagcgtgctcggcatatgaagacccgatttgtagacgagtgggatcggctagtccaattatcagccgatctgcaagccatcattaattctgcagcttcaaagaagctggaatttgcaccggctccacgtcggtcatcctgcatccctcgtgtgaaattcctcaccccgtatatgcggtaccagctgtattccaacgtcattccctcggttcggttggccttaggtgcattcttcgcagtggcatcagtctgcattgtttggtcggaaatgatcaagtctttggcgccccatctctctgccgtgagtttgaccgtggtgcctcactggaaggacaatccagttggctttggtggtcaactcactgcctctgcctggctattgtacatgtgttcggcggctctcgttggtgtcagtgatgtcaaggtatggggaaaccgcgcgcttgtccgtcgtaatacatatggtgagagtgcctgctggtacgccggtcttgtggctcggttgacagtaccaattgcgtacaacttcttgaccttcttgccaaaagagtttaggcgaacgactactttctaccaattccttggtaaactcatcaacctgacccccctcgggaaaggctttgatttcatcttcccaatcttcattctcctgcctatctgcgcaacaatgttcaacctgtacgggcgtatcaaaaacatcttcgggtgcggccttgcagaggacgatgatatccacgatgtcgaaaacaaccctgccgggtatggcatgggtggctggcgtgagggtcgcgacctcattgaacgggaattgaatggcttcggttctctggcggtatcctcccgtggtggtcgctcaacgtgggcgtcggatcgtgatgatgaaggttcccctgggtcatccagactgcggctcccggttgcagagggctcccaacctgcccagaggacagttgttgcgcctactattgtagaaggcgaggatgaggaagacgagggcttcttccagtcctttgcgcatcgtgtcaaaaacacatttgatactaccagcactcctcggtggttccagggtgagccattccgacttccgcgctggatgtcgggtgataacaatcccacagaagaagcttcggcactattcggaggtcgggacgtgcctggtcgtctgcgcctaggttgattacattccggtccttgggtctcgtcaactgctggacagtgtaatataccgtttacttgtacatagctcaattcgtttgtcttgcttggatacaccagttccaattgaacatttttatatacgaaaaaattatccatgattaaagaaggggtattgatgctaccacccgccccccttggataataccatttccctctgcctgaaatttcagtagcgccttcctcatttagctaagtacctctagtttatatggtaaaaagacatacattttaattagaaaagaatcgctgatttctatatgattcaatcccttgattaatgaggtatttgatagagcagttaacgataaagcagtatataaagcagttgatataagatataataggagtgacttgattttattagggatatatatataaactgtaggtacctgctgtctatgcggtatatacagtaaattgggaggcggtaaggagagcggtaggcagaagcaagtgtcgaagcaggtacttagctaaatgaggaaggcgctactgagatttcaggcagagggaaatggtattatccaaggggggcgggtggtaactagcatctataccctttatttagtgggtaaataaaattggtttaaaaaaaaatgccctcgtccaggatcgaactggagaccttcggatttcaatcttgttaccaagaatgtcacattgaaagtatatgagaccaacgtcataaccaaactagaccacgaaggctgtcggcgagttgtctgatagaccactggagccgattatggactgttcccaatttgatagcattatactctgaacataactaataagtgagctacgcttgggcttcaagtatataatctatcccttcgatttggtcgatttttgttgaatatctaataaataaagtatgcccgttgaatctcttcatgatacaaaaataaataccaagttgtatatagtgtaccagctacccgtaagcgaccactcggggtggtggcgcatacgtgttacccgactatctgctgtttgcatgtttgctagatatattgtttgctacacagtaaacgatatgttcgaggcttgcaatatttgcaaaaagtcggctatatcaacaggctgcttcccactttgcaacttgcttcttctctcttcatcttcgttatttcgtcgaatgtattgaacgtactcttactgcttgatcgacctggcacctcataaactactagtattctcggttaacctcacctaactagttagttattctgtatagtttacctcgctccgcttagcaaaattaagctggcattcggatgtccacatatagatatggtgggactacaatgtagtggtgcgatgtaagagggagagagttgtctattcctaaggggcagaatgcccgactatctagttatggagggttggtgcctgccgcaccgggctgatggtcaggtgaccaccatgtccaacaatatatctctctcagacattagaaacatccgtatgacattttcgagtctttaattgcctgcaacaagcatggtcggccacctgtgtgaccatcttacatatttctagtacctcatgtccctttcccctttctccttcctcctttcctgatactcccccaaaatataccataaacagttagttgaggttttaaatcagtacaccactgttcagggccctcgagcaaaaccaattactactgtttccgatcaaattatgatcaagttcggaatacctaggatctcaaatttgcggccgaccacattgtgccctgggtcagcgacagactcaagctgtcagtttctcaaggcctctacctggaatatctcccactacctgtgatagatgcagttatgtcaaagtccaagtccactaagagaatatagaatttgtcaaattcaacttgaattcttcaactatccagttatctcatattccacggtgcatctactctcctcgcaagtatactaccctaatacagttcttcccctcacaatggacgggctaaccttccaaggcaggtaggtattgtatatacctgggccctcgggtattagtgtattatcacatgcacctgagtaatattacttgtcctagagtactacatgtaggtttcaatcttttaaggctttttctccgagtcatgctttatcccaaaatttggaattgagccctggagttttgtttagctgaattaattgtactattacctgtcgttgccttgattgactgctggctatctcattgatggattattcacccacgagccttggagcagcgcgaaagtctttgtggagtcgcggttggttgcgctcgattcattgacttgcaaaacaacacattggacctacttgcgtttgatatatatgttgcttgtcatgagaacggcgtagcggtgccgcctcgtcttgtttatgtatgtacatattcatctcgtacaatacggcaaagctcatatcaatagtcccaccacaatgcgggggtccgttctgcggaataaagaaacatcagtatgtaaataattactctctaaggacttatgtcgaccaaaacttttaccgctttaggacgacatctagagttgctgattcttgccatcctccgggacccttgcagcccgtgaatccttctccctgcaattgcggcaaagtggtaataacaggagcttatggaccttgaatttcttggtgccatcttttccctctcttgttccacatggacatgtaatctcgtgacctagttttctcagaatattgacttctgcttgtgtttcctgtaggcgttgcaattgcgggtcacgaccacctggaaccctgtagcatggccggcaaatgttactcccctcagacctatgccaggtctttgagacacctggaaagccctccacagcatgacacttgacacaaacatacggcggccttttctgaagctttgcaagctcgtctggtgttggagcaagcttctcagggccgtttcgatcgttgccatatctgaccaggtaggcataacatccgccgcaccgtaagctaacctctttccagtacaagagtggcttgccatatttaaggcggttgatattctcggtcacaggacaattgccattttggcatcttccgacgttctgcacgagaaagtccttgtcctcttgtcgtttcttggcgccaagggatcgcagttcaccggtggcatattttgaagcccggcaagccctacacaagatcatctggtattcatctgaccatgtgtaatccggcgcatttgggttctgtggagtatgacaatgtccgcaatgtacttggactccagccttcttatcctcgagccgcttttgctgagcctgcgcgttggccacatactctagcttgggcaaattgtgtttggaatctcggtcgcggtaaccgtagcaataggagcagatgaaaccagcaaggggatcatcctcccgcagcaggaaacgccgagtcatcgtgattgggtgactttccatatgactcaaaacctgtcggcgaagaaccgtgttcttacaaggaaaattgctgcactccgatgcccgctgaagatttgttccagggattccctgtttgagggaccagcatgagtttaatcctttccatcccggagaatacaggactggatctcgaatcacctcagctagctcgaaggtggacagcgtgctacctgcgtaaacacgtccatgccactgaaaagtgtcgaagataatcataaacagcccttctgcaagctgagcattggcagcatcaacacctgagccgaaaacagcgagtagcacaaacctgctcagagccccaggaagacgcgctctatcatagtgtagatttcgaacgccactcctgatactcaattcatggccggttcggcgtactcccccatgaccagtgaatcccacataaccatcacatccaaactcttgatctggaaaatcgccaggaacaaggtggcagtaattcaccatgcgttcatcagcgtaacgcaacaaaggaagagaaagtaggtcttcaaccatccacttgtccttctcgaatagtgctttcacctctggcagtgtaaccgagaggacattagtcataagtgtacccacatcgtatcgtcgcagaccgagaaaaaaagtccaggtgataggcttttctttcttgaagcaggaaaaggacattctctgagcccagtccagcagaggctcaatgacggatctcagggcacgctcaaacttgtccccagaaggtaaaccgcacgggacacccatgactagatgagcagacaacgcttcatcttggccatgatcagacactggagccgtgccaatgtcagccagaacacaagcactatgttcctcagaccaatctgcatcaggatcctgcaatcggtcatattcgtcctcaatatcagaaagatcaaatactgtgacatagttagcgagaacaaacagcgtacttaataatagggtgtatctcttaccatatcgatcttcgacctgatcctcgaccacagaccatggattctcgtgatgtggcactgcatcaacgcgctttatattgcccgcgatcaatgggctacaacgttgatgatttttttgagcgttgtcagaagcgtgggtggtatgattagctgggtgatatctctttggggcccgaggtatgtcttccctattgccgtccccgtgattcttcctcttattgctgggcggctccattgcgtccggcaatcattcaattcaaacacagaaaagatcttatggggtatatattggcccagtgagatagaccttcagatattggtgaagtagaaaagcaagagtgtactatactagtgtccaaatatgaatggatggggcaaccttccaacaatggaagtacctcttccaaaccgtcacattaccaaacaagattaccatttcgttcttatctggctatgtacattgtatactagtagatataccttttggacttgtgatgatatgattgtatattatctatgaacctatgacctggaggaacccaacagctccgccggcctcggcacattttacttacatatagagagtttgcataactacgactacagacgattaaagtatattccaaataggacatattattataattcttatatcataagacaaccccagtgctaattgtcaaatattttagaaattcgatcattgtttacaagtgtcttactggctgctttcagttctggtatatagtactattgtggggtgcaaatttcacaatcggctcaagtggtctatcagacaactcgccgacagccttcgtggtctagtttggtcatgacgttggtctcatatactttcaatgtgacattcttggtaacaagattgaaatccgaaggtctccagttcgatcctggacgagggcattttttttgcctttcctatttagagacgcgggtcatatctatggatcagaccaattatttcgggtgtactccgttgtagggttacttgccaagaaccgggtaattgggctaagcgcccaagcgacgattagattatacttagttacccggttcttgctaagtaaccctaccccccccccccctggtnnnnnnnnnnnnnnnnnnnnnnnnnnnnnnnnnnnnnnnnnnnnnnnnnnnnnnnnnnnnnnnnnnnnnnnnnnnnnnnnnnnnnnnnnnnnnnnnnnnnnnnnnnnnnnnnnnnnnnnnnnnnnnnnnnnnnnnnnnnnnnnnnnnnnnnnnnnnnnnnnnnnnnnnnnnnnnnnnnnnnnnnnnnnnnnnnnnnnnnnnnnnnnnnnnnnnnnnnnnnnnnnnnnnnnnnnnnnnnnnnnnnnnnnnnnnnnnnnnnnnnnnnnnnnnnnnnnnnnnnnnnnnnnnnnnnnnnnnnnnnnnnnnnnnnnnnnnnnnnnnnnnnnnnnnnnnnnnnnnnnnnnnnnnnnnnnnnnnnnnnnnnnnnnnnnnnnnnnnnnnnnnnnnnnnnnnnnnnnnnnnnnnnnnnnnnnnnnnnnnnnnnnnnnnnnnnnnnnnnnnnnnnnnnnnnnnnnnnnnnnnnnnnnnnnnnnnnnnnnnnnnnnnnnnnnnnnnnnnnnnnnnnnnnnnnnnnnnnnnnnnnnnnnnnnnnnnnnnnnnnnnnnnnnnnnnnnnnnnnnnnnnnnnnnnnnnnnnnnnnnnnnnnnnnnnnnnnnnnnnnnnnnnnnnnnnnnnnnnnnnnnnnnnnnnnnnnnnnnnnnnnnnnnnnnnnnnnnnnnnnnnnnnnnnnnnnnnnnnnnnnnnnnnnnnnnnnnnnnnnnnnnnnnnnnnnnnnnnnnnnnnnnnnnnnnnnnnnnnnnnnnnnnnnnnnnnnnnnnnnnnnnnnnnnnnnnnnnnnnnnnnnnnnnnnnnnnnnnnnnnnnnnnnnnnnnnnnnnnnnnnnnnnnnnnnnnnnnnnnnnnnnnnnnnnnnnnnnnnnnnnnnnnnnnnnnnnnnnnnnnnnnnnnnnnnnnnnnnnnnnnnnnnnnnnnnnnnnnnnnnnnnnnnnnnnnnnnnnnnnnnnnnnnnnnnnnnnnnnnnnnnnnnnnnnnnnnnnnnnnnnnnnnnnnnnnnnnnnnnnnnnnnnnnnnnnnnnnnnnnnnnnnnnnnnnnnnnnnnnnnnnnnnnnnnnnnnnnnnnnnnnnnnnnnnnnnnnnnnnnnnnnnnnnnnnnnnnnnnnnnnnnnnnnnnnnnnnnnnnnnnnnnnnnnnnnnnnnnnnnnnnnnnnnnnnnnnnnnnnnnnnnnnnnnnnnnnnnnnnnnnnnnnnnnnnnnnnnnnnnnnnnnnnnnnnnnnnnnnnnnnnnnnnnnnnnnnnnnnnnnnnnnnnnnnnnnnnnnnnnnnnnnnnnnnnnnnnnnnnnnnnnnnnnnnnnnnnnnnnnnnnnnnnnnnnnnnnnnnnnnnnnnnnnnnnnnnnnnnnnnnnnnnnnnnnnnnnnnnnnnnnnnnnnnnnnnnnnnnnnnnnnnnnnnnnnnnnnnnnnnnnnnnnnnnnnnnnnnnnnnnnnngcgatcgaaacggccctgagaagcttgctccaacaccagacgagcttgcaaagcttcagaaaaggccgccgtatgtttgtgtcaagtgtcatgctgtggagggctttccaggtgtctcaaagacctggcataggtctgaggggagtaacatttgccggccatgctacagggttccaggtggtcgtgacccgcaattgcaacgcctacaggaaacacaagcagaagtcaatattctgagaaaactaggtcacgagattacatgtccatgtggaacaagagagggaaaagatggcaccaagaaattcaaggtccataagctcctgttattaccactttgccgcaattgcagggagaaggattcacgggctgcaagggtcccggaggatggcaagaatcagcaactctagatgtcgtcctaaagcggtaaaagttttggtcgacataagtccttagagagtaattatttacatactgatgtttctttattccgcagaacggacccccgcattgtggtgggactattgatatgagctttgccgtattgtacgagatgaatatgtacatacataaacaagacgaggcggcaccgctacgccgttctcatgacaagcaacatatatatcaaacgcaagtaggtccaatgtgttgttttgcaagtcaatgaatcgagcgcaaccaaccgcgactccacaaagactttcgcgctgctccaaggctcgtgggtgaataatccatcaatgagatagccagcagtcaatcaaggcaacgacaggtaatagtacaattaattcagctaaacaaaactccagggctcaattccaaattttgggataaagcatgactcggagaaaaagccttaaaagattgaaacctacatgtagtactctaggacaagtaatattactcaggtgcatgtgataatacactaatacccgagggcccaggtatatacaatacctacctgccttggaaggttagcccgtccattgtgaggggaagaactgtattagggtagtatacttgcgaggagagtagatgcaccgtggaatatgagataactggatagttgaagaattcaagttgaatttgacaaattctatattctcttagtggacttggactttgacataactgcatctatcacaggtagtgggagatattccaggtagaggccttgagaaactgacagcttgagtctgtcgctgacccagggcacaatgtggtcggccgcaaatttgagatcctaggtattccgaacttgatcataatttgatcggaaacagtagtaattggttttgctcgagggccctgaacagtggtgtactgatttaaaacctcaactaactgtttatggtatattttgggggagtatcaggaaaggaggaaggagaaaggggaaagggacatgaggtactagaaatatgtaagatggtcacacaggtggccgaccatgcttgttgcaggcaattaaagactcgaaaatgtcatacggatgtttctaatgtctgagagagatatattgttggacatggtggtcacctgaccatcagcccggtgcggcaggcaccaaccctccataactagatagtcgggcattctgccccttaggaatagacaactctctccctcttacatcgcaccactacattgtagtcccaccatatctatatgtggacatccgaatgccagcttaattttgctaagcggagcgaggtaaactatacagaataactaactagttaggtgaggttaaccgagaatactagtagtttatgaggtgccaggtcgatcaagcagtaagagtacgttcaatacattcgacgaaataacgaagatgaagagagaagaagcaagttgcaaagtgggaagcagcctgttgatatagccgactttttgcaaatattgcaagcctcgaacatatcgtttactgtgtagcaaacaatatatctagcaaacatgcaaacagcagatagtcgggtaacacgtatgcgccaccaccccgagtggtcgcttacgggtagctggtacactatatacaacttggtatttatttttgtatcatgaagagattcaacgggcatactttatttattagatattcaacaaaaatcgaccaaatcgaagggatagattatatacttgaagcccaagcgtagctcacttattagttatgttcagagtataatgctatcaaattgggaacagtccataatcggctccagtggtctatcagacaactcgccgacagccttcgtggtctagtttggttatgacgttggtctcatatactttcaatgtgacattcttggtaacaagattgaaatccgaaggtctccagttcgatcctggacgagggcattttttttttttcccacatcctaaccgagatggaattcctctaatgcctctcttctatactgtacaacccttggatttgtcgatttttagtatgtttgctagatgctaggcagttagtgatactcgggacctactatatattaaattgagggttgggagtgctactgtttaaatattgaattcttttgcatctgtaaaaatacttaattaaatacaacgctatttgtgagctaaaggaagcctgggtgatttttctacagcgtatgggatacacctatgaaaggtgcttcaaagtatatgtatacatctcgaccacctctcaatagcggtccgtatttcgtgcacatggcgcgactctagcatagggacctgttcctaggtgtacatagttgttaaacttcttagtctaacagctcttcaatctcacctacattcatcatacacctcggcatctctgtagacctctatcctcatggtacctactataccagcccattgatataaccttggttgtatccagcatgtatctcaagtcttttctctgtctctagacaccagcctacgcttcattccccacttgttgttgcatccataggcggatagtttaggataataccattcatactgagtggatatcttccacctggctctgcggactactaaaaattgagttgcttcttcactgaaatggcttgttgtaatagacaagtgtgttttcttctcgccactcttcgtagcctgtatcactatcttcccaatcaactcggaacatgtatagtcgtcaatatctaccaatccggtgcttaacaagcagcctcgagtcaaatacataggtattggccgtaaccagctacatgggtgaaattagaagactgtacgatgggtcaggccgcgacaagcagccgtgtggcaagaccaatggcccggttatcaaaaatatatacatttctcaaacgtggtttacactggcatattcttgatttattgattgaagaacatcgtaacgaacatatgcaggtggtattcagaatgcaccccggctgatgcagctggactcaaatggatggactcacatggtactgtcgaatatctacacttcaaatgggcgcctttgtcaacctttacatagtcccctaacttaacttcttccacagttgaccatcttctcgcatttcaccatgcacccagacgtctttgtagacctgttggtatgtcagatcctggttcttgggtatttgatacgccatatatttgttactgtagaccagagagagatagtaccggcttttatagtagctgccccattattcttcttcatcttcttcttcatcttcttcttcatcttcttcttcatcttcttcttctactctctctctctctctttatgtcaaatacgtagcttgtcatagcagggtgtcttggagacttgatcaaggacaacttaggtggttatcaggtgagtctaaatgacatatctactagtatataatgtaggtatagatgacatggtaaccattgtatggtactgtaacggttccggggaagcactttgaccttaaaaatgttgccctatctatatttggacactagtatacacttgctttcctacttcctaattcccgaaggtctgtctcactgggttagtatatacctaataagttaatttctgggtttgaattgaattgattaccgggcgtaatacggggagtgcaatggggaagacatatattgagcccccaggagatatcacccagctaatcacactccccacgcttttgacgatgtagacgactttttaatataaccgcagattttacctcgcttgttctctttctatatatagaaagatcttctatacgggttatgcttctaattgccttcgcagtctatacacatatggatatgatccctgttattcttcattattcttttggttttaatactacgagtagaacgatataccacctatgcagataaataggatcattgaagtgctacatcctcttcggggggagaagccagccagctactcttgttacttgtattacttgtcgtagacagaaagatcggtctgaacattatactcatttctcgctaacttctttattttgcagctaattcttcttgtcttctgggcacagtaccggtaatttcgctactccccgtgaaccagtaatagtaagtggcacccagtaaacgccatggatccaagccaattcttgtcggctccttgcaaggaggagtgccaggaggtgcttgttggagtttataagcgaaagcaagttccttgcgaattgtatccagatccgctgtgggattcacatttccacgtagtcacatagtgtaattgctgttttcaaacgaatgtcgatcccagtccttggggatggagctggcgattggggacctattgccttggttggttctggcataggttttgctcccctttctagttcttttcgacttatcttgctagtctgttagatgttgatttggggggcattcatttactcagtgctctatatctccacggataaacaaagccctttcgttaatccctgaagtatctgtatacctgcatgctcgtgtcactccatcactattgggtcctaaggatcgaacattctttggggtttgaattctttcttctatttcccctaccccggctctgccataatagctagggctgacgtctgttggtggttatcactgtttcgattcgtgatagggaaataacaagaaacggaaaatgaagagagggacatggccacataaatggccggccatgcttgttacgaacaaaaagagactcgaatgtgtaaatataggtgtttctaatgtccgatatatatacatgcggacatccgaatgccagccacaatacacactgtataaaattttatttttattttttttgatcatgaggaactttagggaaaatttatttgttaaatattcaaccaaaattggctacatttggagggatagaatttcggttatttacttgaagcctggctttagtccatagtaccattaagtcgtgtaacttccataatcggctcaagtggtctatcagacaactcgccgacagccttcgtggtctagtttggttatgacgttggtctcatatactttcaatgtgacattcttggtaacaagattgaaatccgaaggtctccagttcgatcctggacgagggcattttttttgcctttcctatttagagacgcgggtcatatctatggatcagaccaattatttcgggtgtactccgttgtagggttacttgccaagaaccgggtaattgggctaagcgcccaagcgacgattagattatacttagttacccggttcttgctaagtaaccctaccccccccccccctggtnnnnnnnnnnnnnnnnnnnnnnnnnnnnnnnnnnnnnnnnnnnnnnnnnnnnnnnnnnnnnnnnnnnnnnnnnnnnnnnnnnnnnnnnnnnnnnnnnnnnnnnnnnnnnnnnnnnnnnnnnnnnnnnnnnnnnnnnnnnnnagttcccgggttcttgctaagtaaccctacccccattcgggtgtagccatggtatccctacacccgaatgggggtagggcaagaaccgggtaccgagaaaatcataacatacggcatgtcttcgttctcgaccctaagggcgatctagccgaattgaaacgagcagaaattgagcataattgtttaggaattcttttcaagacacattagatattgcacgtaaatgtatatgtaactagctcattcctcttcgtaatccatggagggttactcatcgaatttggtttacatcaatacagttgactatacaactagctatatgttaatatctgatgtagccgacattttgatacataccgaaagacaggggctgtatgaccccgcgtttttgcacatacatacgccgatcgaggtcagattgggttactcaaggccgagaaagagcctccatatcacgactaatgaggagctgcatgtaccttgataagatctccaaaaaaatacagccgggaagtatataaccatattcaggatagggacatatggatgtaaccggtctgccttgtgggagcatcgccacactgccaggcagcctcaaggtaatacaaggcacccatcaatttagttaccccaaccattgcaaatgtcgccatgattccgacgtcaaaagaattgacctgaattcagacgatccactaggcagacacaaccttgttgggagtatcactaaccaattgctatggcaaaaaactactctccgccttatctgcccattccagacgacttgggggcatgacttcaccgtccacgctctcccctccacagagatccatgactttactgcccccaatcctcgctcagtccaccttgggcgagaagtgcgcagtatacatagaccaggtcaccgataccctccccgttcatctacattccctccgccttcaactggaccccgttctcatctacctgtccaacacgccactcggccctcttgcgaaaaagctgccatttgctccagacgaccagccgatcgctctcctcgcagctgttgttatttgcatattcaccatcgtgatgagttggcgcaaccccttaaaaatgctccgccgctcgccgagctacgctcccgcatcatccaacccgcaggttagcgatgaggatttcagctacatcacaccttcagatatggcgggctcgcctggagatgaagccgacccggatgttatttcactccgtcaccgcggcactatctacccattgcgcttccgcgcatacgccattgtcgacggtctcttgactatcggagacatacgaaaggcggctgctgagtgcacaggagccgaacacccgaactgtgtgagactgctgtacaagggaaagctactcaagaacgacgcgcagacatgcaaagccgaggggctcaagcagcactccgaggtgctatgtgtggtgtctgacgcagtatcccagagcgatgtctccgatgataacggacaaaacatccctgtatctgcatcagcgccagcacccccgccgctacctcgccccactagtgcagggggcgcctcgtcccctcccacctccgcgggtggaaagagcaagaactcgagaaagaagaaacgcaatggcaagaagtcgcccgtcggtgcagaagcccccggtccctctcggtcgccacggcctacatcgtcaggccactcaggtgcccctgccgcgtcgcctaacatcaagttgctgcgtactccgctggaacaggtcaatgctctggcggaatggttcgagcaggagatgaagccgctctgcgatgaatacattgcgtatccgcctagtgacaagaagaaacgaaactttgagaataagaaactgagcgagacgatcctcacacaaatccagttgaaggcggatggaatcgagccaaatggtgacgagagggcgcgcagtgcacgccgggccctcatcaaggatacgcaggcggttctcgccgagctggacaaacttgtacagccgggagatttgtaattggtctacatacatatgtagacacttacctccgtacaatatgtatcaatctcataccaagggctgttctaccggtcaagtttccattttgctgggacctgtccagcccctcggggtggcattggcatattgtgatatatcaaccttgctatttcccctactaaacctgtcggaatgatttgccggcatgtatacatacccttttcgtatttcccctctctttcttccattttccccgtatacccaaattgggggagctcacaggaggttctcaccgttgtctagatcactttagtggcatctcggaatgatcaacatggctcaggggcaatgcacggcccagaactaaagttgcgagaatcgagatttttcttaaatcatagtctattgaacatttagaacgattattgattaatatgctgtaagagagacatatgatgcatgcctgggaggatgcgataacaaataccgtagtccatcctccgtactccgtagtatgtactgagtggacttggtttccacctactattcccagtctggctacctttcctccagggctctccttagactctccctcttgctctttttttttccctatcttgatcttctcttctttacattctctcctcttttctcgaactttcatttattctacctccttgccataattggtaatcgacctctccttgcctcatcctcccggccccgcgagacctcgaagaagccttccacgggaccagccaccccccgccagcagctcttgtcgaaccaaacttgacaaactggaccccctgcagttgtgctcaaccctacggctgtgttgacaatttgctgttttcggtgtaccccttacgctctaccttgcgactctacctggaatggcttgacccgacaagtcaacccatctctaccgcaatctctactactgagccgggttacagctggactggcctttttttcatttgtgaacaataacctctggaatggcgggtgtcgctacagcggcatattccgcagatgccttagcatcgcccgtggatggctcgctatgggattttgcggtaccacttgtgcacgaggtaagattattcggtgtggcattctagtctctgacctggtagcccaagaatgtgggaaagaaaaaaaaaagcgctgatccccttttcccccgcaggataaccaccactcatcgaaacaacgtgagtcgcacgactcgaactcaatcggcgcaaaattctctcgacagcgtacctcgaacggctcacgcagctcctcggtctcgcgcaacgtacacgcacatgaatcgccctatctagcctcgaaccgaggacggagggaacccagtctcaatcgacatgggagtgaagtaggcagtatgcgagatgcttttggttccgaggcagccggtcgtaaagagcccgaagaggccgatgatgatcttcaactgagtttagacggaaagacgaaccaggaaaaatggatccaccgagacaagctggcaaagatcgagagtgaagagctccaccaagcagccattctcttccagcgacggatgagaggagagagcaaatcgagtgtgggacgtggaaggagctatgattcacaccagagtcctgctaacgggactggtacagcgacctcgcccgctgcagaatattccgaaccctggccgaaagtgaaagaagaacccggcaagcggggtgtgaacaacaatgtaggtggcagtgtgcgggaacattgggatctccgccgaccagaggagattgctgcggacgatgcagccgccagcctctacagccaccctggccttggaaaaagcgcctcccgaatacccatctctacggctagtccagttcccatcctcggccgcgattctggcagttcaaggagccgtgccgcaacagatgaagaagaccggtcttcacggaaccgtagagccagcgaacctatcaccatcgagcaagatggttcgactccttctccacaaagtcgaccaggcagtcgtggattcagcagtacacagaacacgggcaagaagacagtcaagagctctacgaaccgaaagacctctgctccacctgcgaacaggaagacgagcactcctcgatctcgcgctgtctccggtaacaacacacagcgccctaccacccggtcaggtgaaagtcgtcttccaacaaccgctaaccgacccgaaggagacccgccttggttggcaaccatgtataagcccgatcctcgccttccaccagaccaacagatgatcccgaccgtcgccaagaagatgatgcaggaacgctgggagaaggaaggccggacaccaaacacatacgaccgccacttcgcgcccctcgcagtgcacccattcgatacgccgcctcctgtagccaccaaggctgagccagaaccgcaaccacaaccgcaaccgcaaccagttgagtctctacagctcgaggatttgtcacctcggccatcaaagagcccagaaccgccccgcccgaatacaagcaccggctacagcaccatgcccaaggtgcaggaaacacccccaatgggattagcacctaaccccaaccccaactggagccctccagttgtcaccgcgcaacagctaccgaagaaagagaagagctgcgggtgctgcattgtgatgtgatggactctcactctacaaccatctgtccaatctctcttctatttccccaacatacttttgatatttgcacatctgcttgattcccttctctgtcatttttttattatttctagcgtctccggcgggatggtgttctgtcggttctgttctgtgattttatatccggcgatctagggcatttcttcgccttgagttcaaatttctccagactgctttttaatttggcatcctccttcaacaccagagcatggatattcttgtttctcttctcccatgcattcattccttgatatttcccttctcatctcctgtgatcattgtgattcctaccgaagtggtaagggggacctcaaaaagctcgctccagattgcgatggatggaatggggatgagagacatacacttcacaataaacataagttgtgatgtgcgcctcttccttcccatcctattacctgcctgtgactttcttgaccccatgattccctttcccttctccaatccttggatttctctccgaaacatctttgaagcctgttttcccatattcccaagccttcttactagcgattttctcctctttttttggtctggtcaggtggatttgtttgccttttgaatgccagataattacggagttaatcagatatcaggttaaatgaatgaacacatacctgcacaaaattactatttgacttgtactcgtaagcatgtagatactgcgccaactagcccaatatagatcaaattgtattttatagacatctacgaactatatgtaccttagctatctagactttacccaaacaagaaaaagcttcccggctgacaaatatcacatgacatcattgccgcatccaatcccgcaatcttgacggaatggccaaccaatcctctcatctttttgcttgtacttgtaccccgccaaatctcctataaaaagagacactaccgcctcctctctttcctcccaaaccgcccaccatttcgtccatctttacccgtcttttcggctccttcgccggcccaaatcccgccgccatgtccgccgcaaagactcgcgctcagtccctcattaacgacaacgctgtcgttgttttctccaagtcatactgcccttactgcgattcttccaagaagttgctcgacagcttgaacgccaagtacactaccctcgagctggatcaggatggtaggtcttttgcttttgctcgcgtgcgagaagaggagttttagcaccgagctagctatatttttgatacgttttttggtctctcttttgaatgaatcgctaatatgagtttattacagaggaaggagctgctatccagagcgctcttgccgagatctcaaaccagcgcactgtgcccaacatcttcatcaacaagaagcacatcggcggcaactccgacctccagggtaagaaggacctgaaggagctccttaaggccgctggtgcgatctaagcggtgatgtcatataaacaagaatctcccgaggcctgagtctgaatatagtctgaggtatatttcgtactctacagcctttattttatatctgccaatccagtcgtctcatagacttcctttcctaggtcttgtagatctatgtaatgtggggagatattttcatgccgtaggactggagggatcaaaagagccctgtcatctttcagcgttagatgcgtattgagtggagcattgctctggaatgtcttgtagtccgacatgggagaaaagtgaacagcgactaactcgtacaggtatgttgatacaaacaaacaaaatcaaagccataacccaaggataaatcagataaccttctgtacgacggttccaagtggcctctcaacaatcgacatcaacccgtcgacaatactcgtccgggccccttcacttgaaacagtcttgccagccaaataattcaaccaaacaagccgactaatccgctcatcagcgacacgccccatccacttaactggcttatcagtcccaggctggaagagcgcgtccaaagcgccgtgcgcatcgcgcatcaaaaccagcgtctgtcccttcggcaccgactttcccttccctgcgccgaaaacagccttgaaatcattcattgaagttccgaagctctcatcctggaactcgctcggccccgcggtcttcttcgccttcgcgcgcgcagtgataccacgcacccatccgtcgcgcagatgcataaagtctgtgttacgagtgggaacgatacggaatgcagtgcggatgccgttttccttgatgatagcagaccaggcggcgtcgccgcggtccgcgtcaaggagaagctccttgagctgctggcgctctggcgagacgagggaggtagcggcggtagtgccaacgccggaaatggccgcgtcagaatcggtagtgagcgggtggattgctgtgtgcaggaggcggcgttgcagctcggttatgtcggatttcgcgacgtacaggccgaccacgtaaacttcaattgagaggaaggagacggtgcggacaccaaggccaagtaattggtattcttcgccttgggacggcgctagatcgtcgccttcttgcttgccttctgttgcttcggatgtggggagtcggattgtgcttgggaagtgagggatggtgcttgttcctgttggcacttgctcgagtctgtcttggccttggatcgttattaatgatgggccaccgctggtgaagccgactggtccgtccatgcgcattgcgccattcttcggaggtgtggagatggtcttgtcatctttgctggtatctagttcgttgaggccgaagaggtctagcttgatcacaccgtagagaccgactgcacagacaatcatgccggctgcggagaggaccatctttcgctgagcttgggaggcatgctggagatccgccgctgcggatgctcgggagcggagggggttattggtggcattggagcggaggggagtggtggagagatggcgagaggagaggcgtgttgtgcggatttgttgccgagtgaggcattggtaagtccgccatgggttctgacggagggtggaggccattttgagcttcgttcgttcgatgaggaatggcgagggcaggattggcgggtgacggagatggagtgtggggatgcacgtgatatggcatgatctacattagtataccgtcatgtatcaagagatggtttcggtggaataaggaggtttttttaacttataatgatggagctctactcatctcatgtgaaagctggcacatcttgatggcagttacttaaataatcagtctctaacagaagggctgtggatgcactatgatatgactacgtctggtgcatgttgatatttacttgacaataaccttgtgagagccaccggtcacttcgaagattgctgtatcatcagcataggcaacttctcttatcagctgcttgccatcaatggtgatcaaaggcttcttcgacgcagtgacatagggcaaagtgacattcccaatagtacccttcggcgccgagaaagtcaacacatatccactagaattcaaagcccaagacgccttaaacttcccgagggaggtgacaaagccagcctcggcaaaatccaagtctccaaattgcggcgcgattttccacgtcaatcctagtggcgagaccacagagagaccgacaacaaactctgttaacgcagacgtcggaccagatgaccagccgtgtgcatgtgagacatatgatggatcatagccatatccgcggtccatccgatacccgaaagttccgttccttagatagccctcaattacagtgctctctgtaccattcgggttgttgatataccaaccccagctacgacgaatgaggtccagggcgcgtgcgggcttgcgagcaatgaagtgactttggatctcaaaagatgatatgaacgaagcaatgttctctggcaactcaggagctacggccccgatgggggtccagttcttgagaagcttttctgaaatgctggctgtgtgctcttcgtcaacaacaccgaaaataattgccatactattagcatcttgtggatgtagagaggtatcggttgcgttgtccttgaatgcgccgtacgactcgtcccagcagtaggtgttgattgcttttttgagattgacagcctgggagctccaagtgcttgagagattggctgaatctccagcccacaaagagagagaggctcccgtttgtagcgtatgatagagactagagcgtgttagctgtaaagccttctgcataattgattcacaacgtacatcatctgtgcttccgagttgttataaccttgctgccatctcgcccagtctcgcgtgcctgtcacattcaaaagcccgctgggataagtcacctttccataaatatattccatggcgtgcagatagctggcccaattctccaacaagaagtctgtatcattggtgtaaagcacataattataggtgccaatcatagaccacatatgatatgtgtccgagtccttctggctcaatggaggcccagactcatcaaatgcacctgttgtcttgttctataatccccagaactgtcagttctatgctaaaaatagaacaaacaaaactcacctgggtgttgtacataatctgcaaagcgtttttaacactttccaaatctcccagactcacaaaagcggaaggcacggcaatgcccatgtcaccaggccaaaccgcacgatctcgctttgccccatcaactataatcgtgtctcctggcccgagagtcccattgtttgcccacccagaggtgataccctttgcaacacgaccagtagtcacaggcacttcattcgtctgcagagtatatgcaccgctataccagatgcggttcaaaagctcatcattgcagtgaaagtacccctgataagctcggagattcgaccaagtgggcttaaatgcgacttctaagctcaaatcatcaatttgaacactgcctgaattgtctgtgatcaagaagacggtcaagtatcggaacccgccccgcagatatttgtccggcatgatatatgtacccttctcagttgacgatatatttgcatacaacgcgccatcatgatagagagcgtttgatgagtccgaccactctccaatccaatttttggcttctgtaaatgctagccctagagctccgctaccggtggaggtatagtctagatggacgatgccaccgacttcaataccgaagtcgaatacaatgagtgatccattgccgtataattttgctttgtatggatgcgaggagtctgccacagcgttcgtttttaactccgataaggttgagactggtcgtactgttcgcgatgccggtgcgtatatgttctcttcccatggcccgctgaatgcagtgttcgtaggcccagaacaagaggtatcacgccagcaagtgtctgcaacagatagcgagaagagagaccaaagaatcaataccacactgcaccagtatgattgtgccattggtggttgagttgaagtagataaataccgcatatcgtaacagcataccaaccttttttaaatacagagcatagcacagatagaaatggctcgaccgtgcaatagtggatatgggaaggttagttaccccatattcgcgattggtggaagaatcagggcaaacgatgttaacacttgtaggactttggcaaggatcggcgaaacaagcactcataagacttcgaaatcatgtttttactgcataaaccatctagcctagtcttttctcgcagtaaattttctccgcaatgtcatgttgccatgtccgctcggtgtaaagaccgaccgagtgcaacatgggaaattcgagcaatgtgcggggttctatagctagggaatataagacctcgttttttattagaaaaatatccaattgagcagtccgatccgagctcacaatgcgattcttcggcattccttccctagccatgcccctatggctgactgtgtcaccatttgtatatgcaaatgaagaacgcagctcaaatgtttgcattgtcaaagccaatgggcaccagagagatgacgtccctaacatcctagaagccttccaacggtgtggcaatggtggtactatcatatttccagaggaccaagcctactggattggtactcggttgaaccccgttgtaagcaatatacaaattgaatggcgcgggaaatggacagtaagtgggctgtcactgtatccaatgataaacgcaactaatacgagctagttctccgacgatttggattactggcgtaatcactcatatccagttgccttccaaaaccacgctgctgggttcattatcacgggccacaatatcacgatcgatggatacggcactggtagtatcgatggtaatgggaacacatggtacacagccgagaaaggcgacacacagcccggtagaccaatgccgtttgtattttggaatgtatccgatgttagtgtcgaaaatttctacgtcaaagacccccagttgtgggctgtaaatatcatgaacggaaccaatatgcgcttcaataacatctactgcaatgcgactgcggtagatgcaccatacggcgaaaactgggtccagaatacagacggatttggtatatccacccactccggtttcctcgcggccaactaacactatggatagacacaatggacgtgcagaatgtccaactcagcaatttcgtctaccaaggtggcgatgactgcgtggcgattaaaccgcgatcctacaatgtcgatatccacaatgtcacctgccgtggtggaaatgggattgctataggcagtctgggccaataccaggaagactcaagtgtggctaatatccgcatcgatacagtcaaggtgatccgatacaacgatgacatgcacaacagcgcgtatatcaaaacgtgggtcggcgcacttgtaccgcagagctcgtatgagaatgctggactccctcgcggcggtggctggggcagcattcggaatgtgttgttctcaaacttcgaagtccatggagccaatgctggacctactgtcaaacaggacaatggaaacaatggctcgtattcgggaacaagtttgatgagtatttccaatgtcgcatttgtaaatttcacgggctatattgagagtacttcgacgaatgtggcatctgtttcatgctcaaatgtgcatccgtgctacaatatcgattttgataacgtgattctatacgcccaagagaatgcaacgacgccgggaattgggtcgtgcaagtatacattggaaggaggggtacacgggctcgatggatgctgaaaattcttcataccagaaacacaagcaagtaaggggacataatgtcagaatctaggatgaatactgtcatttttcatccctgatacagttggatcacgtgactnnnnnnnnnnnnnnnnnnnnnnnnnnnnnnnnnnnnnnnnnnnnnnnnnnnnnnnnnnnnnnnnnnnnnnnnnnnnnnnnnnnnnnnnnnnnnnnnnnnnnnnnnnnnnnnnnnnnnnnnnnnnnnnnnnnnnnnnnnnnnnnnnnnnnnnnnnnnnnnnnnnnnnnnnnnnnnnnnnnnnnnnnnnnnnnnnnnnnnnnnnnnnnnnnnnnnnnnnnnnnnnnnnnnnnnnnnnnnnnnnnnnnnnnnnnnnnnnnnnnnnnnnnnnnnnnnnnnnnnnnnnnnnnnnnnnnnnnnnnnnnnnnnnnnnnnnnnnnnnnnnnnnnnnnnnnnnnnnnnnnnnnnnnnnnnnnnnnnnnnnnnnnnnnnnnnnnnnnnnnnnnnnnnnnnnnnnnnnnnnnnnnnnnnnnnnnnnnnnnnnnnnnnnnnnnnnnnnnnnnnnnnnnnnnnnnnnnnnnnnnnnnnnnnnnnnnnnnnnnnnnnnnnnnnnnnnnnnnnnnnnnnnnnnnnnnnnnnnnnnnnnnnnnnnnnnnnnnnnnnnnnnnnnnnnnnnnnnnnnnnnnnnnnnnnnnnnnnnnnnnnnnnnnnnnnnnnnnnnnnnnnnnnnnnnnnnnnnnnnnnnnnnnnnnnnnnnnnnnnnnnnnnnnnnnnnnnnnnnnnnnnnnnnnnnnnnnnnnnnnnnnnnnnnnnnnnnnnnnnnnnnnnnnnnnnnnnnnnnnnnnnnnnnnnnnnnnnnnnnnnnnnnnnnnnnnnnnnnnnnnnnnnnnnnnnnnnnnnnnnnnnnnnnnnnnnnnnnnnnnnnnnnnnnnnnnnnnnnnnnnnnnnnnnnnnnnnnnnnnnnnnnnnnnnnnnnnnnnnnnnnnnnnnnnnnnnnnnnnnnnnnnnnnnnnnnnnnnnnnnnnnnnnnnnnnnnnnnnnnnnnnnnnnnnnnnnnnnnnnnnnnnnnnnnnnnnnnnnnnnnnnnnnnnnnnnnnnnnnnnnnnnnnnnnnnnnnnnnnnnnnnnnnnnnnnnnnnnnnnnnnnnnnnnnnnnnnnnnnnnnnnnnnnnnnnnnnnnnnnnnnnnnnnnnnnnnnnnnnnnnnnnnnnnnnnnnnnnnnnnnnnnnnnnnnnnnnnnnnnnnnnnnnnnnnnnnnnnnnnnnnnnnnnnnnnnnnnnnnnnnnnnnnnnnnnnnnnnnnnnnnnnnnnnnnnnnnnnnnnnnnnnnnnnnnnnnnnnnnnnnnnnnnnnnnnnnnnnnnnnnnnnnnnnnnnnnnnnnnnnnnnnnnnnnnnnnnnnnnnnnnnnnnnnnnnnnnnnnnnnnnnnnnnnnnnnnnnnnnnnnnnnnnnnnnnnnnnnnnnnnnnnnnnnnnnnnnnnnnnnnnnnnnnnnnnnnnnnnnnnnnnnnnnnnnnnnnnnnnnnnnnnnnnnnnnnnnnnnnnnnnnnnnnnnnnnnnnnnnnnnnnnnnnnnnnnnnnnnnnnnnnnnnnnnnnnnnnnnnnnnnnnnnnnnnnnnnnnnnnnnnnnnnnnnnnnnnnnnnnnnnnnnnnnnnnnnnnnnnnnnnnnnnnnnnnnnnnnnnnnnnnnnnnnnnnnnnnnnnnnnnnnnnnnnnnnnnnnnnnnnnnnnnnnnnnnnnnnnnnnnnnnnnnnnnnnnnnnnnnnnnnnnnnnnnnnnnnnnnnnnnnnnnnnnnnnnnnnnnnnnnnnnnnnnnnnnnnnnnnnnnnnnnnnnnnnnnnnnnnnnnnnnnnnnnnnnnnnnnnnnnnnnnnnnnnnnnnnnnnnnnnnnnnnnnnnnnnnnnnnnnnnnnnnnnnnnnnnnnnnnnnnnnnnnnnnnnnnnnnnnnnnnnnnnnnnnnnnnnnnnnnnnnnnnnnnnnnnnnnnnnnnnnnnnnnnnnnnnnnnnnnnnnnnnnnnnnnnnnnnnnnnnnnnnnnnnnnnnnnnnnnnnnnnnnnnnnnnnnnnnnnnnnnnnnnnnnnnnnnnnnnnnnnnnnnnnnnnnnnnnnnnnnnnnnnnnnnnnnnnnnnnnnnnnnnnnnnnnnnnnnnnnnnnnnnnnnnnnnnnnnnnnnnnnnnnnnnnnnnnnnnnnnnnnnnnnnnnnnnnnnnnnnnnnnnnnnnnnnnnnnnnnnnnnnnnnnnnnnnnnnnnnnnnnnnnnnnnnnnnnnnnnnnnnnnnnnnnnnnnnnnnnnnnnnnnnnnnnnnnnnnnnnnnnnnnnnnnnnnnnnnnnnnnnnnnnnnnnnnnnnnnnnnnnnnnnnnnnnnnnnnnnnnnnnnnnnnnnnnnnnnnnnnnnnnnnnnnnnnnnnnnnnnnnnnnnnnnnnnnnnnnnnnnnnnnnnnnnnnnnnnnnnnnnnnnnnnnnnnnnnnnnnnnnnnnnnnnnnnnnnnnnnnnnnnnnnnnnnnnnnnnnnnnnnnnnnnnnnnnnnnnnnnnnnnnnnnnnnnnnnnnnnnnnnnnnnnnnnnnnnnnnnnnnnnnnnnnnnnnnnnnnnnnnnnnnnnnnnnnnnnnnnnnnnnnnnnnnnnnnnnnnnnnnnnnnnnnnnnnnnnnnnnnnnnnnnnnnnnnnnnnnnnnnnnnnnnnnnnnnnnnnnnnnnnnnnnnnnnnnnnnnnnnnnnnnnnnnnnnnnnnnnnnnnnnnnnnnnnnnnnnnnnnnnnnnnnnnnnnnnnnnnnnnnnnnnnnnnnnnnnnnnnnnnnnnnnnnnnnnnnnnnnnnnnnnnnnnnnnnnnnnnnnnnnnnnnnnnnnnnnnnnnnnnnnnnnnnnnnnnnnnnnnnnnnnnnnnnnnnnnnnnnnnnnnnnnnnnnnnnnnnnnnnnnnnnnnnnnnnnnnnnnnnnnnnnnnnnnnnnnnnnnnnnnnnnnnnnnnnnnnnnnnnnnnnnnnnnnnnnnnnnnnnnnnnnnnnnnnnnnnnnnnnnnnnnnnnnnnnnnnnnnnnnnnnnnnnnnnnnnnnnnnnnnnnnnnnnnnnnnnnnnnnnnnnnnnnnnnnnnnnnnnnnnnnnnnnnnnnnnnnnnnnnnnnnnnnnnnnnnnnnnnnnnnnnnnnnnnnnnnnnnnnnnnnnnnnnnnnnnnnnnnnnnnnnnnnnnnnnnnnnnnnnnnnnnnnnnnnnnnnnnnnnnnnnnnnnnnnnnnnnnnnnnnnnnnnnnnnnnnnnnnnnnnnnnnnnnnnnnnnnnnnnnnnnnnnnnnnnnnnnnnnnnnnnnnnnnnnnnnnnnnnnnnnnnnnnnnnnnnnnnnnnnnnnnnnnnnnnnnnnnnnnnnnnnnnnnnnnnnnnnnnnnnnnnnnnnnnnnnnnnnnnnnnnnnnnnnnnnnnnnnnnnnnnnnnnnnnnnnnnnnnnnnnnnnnnnnnnnnnnnnnnnnnnnnnnnnnnnnnnnnnnnnnnnnnnnnnnnnnnnnnnnnnnnnnnnnnnnnnnnnnnnnnnnnnnnnnnnnnnnnnnnnnnnnnnnnnnnnnnnnnnnnnnnnnnnnnnnnnnnnnnnnnnnnnnnnnnnnnnnnnnnnnnnnnnnnnnnnnnnnnnnnnnnnnnnnnnnnnnnnnnnnnnnnnnnnnnnnnnnnnnnnnnnnnnnnnnnnnnnnnnnnnnnnnnnnnnnnnnnnnnnnnnnnnnnnnnnnnnnnnnnnnnnnnnnnnnnnnnnnnnnnnnnnnnnnnnnnnnnnnnnnnnnnnnnnnnnnnnnnnnnnnnnnnnnnnnnnnnnnnnnnnnnnnnnnnnnnnnnnnnnnnnnnnnnnnnnnnnnnnnnnnnnnnnnnnnnnnnnnnnnnnnnnnnnnnnnnnnnnnnnnnnnnnnnnnnnnnnnnnnnnnnnnnnnnnnnnnnnnnnnnnnnnnnnnnnnnnnnnnnnnnnnnnnnnnnnnnnnnnnnnnnnnnnnnnnnnnnnnnnnnnnnnnnnnnnnnnnnnnnnnnnnnnnnnnnnnnnnnnnnnnnnnnnnnnnnnnnnnnnnnnnnnnnnnnnnnnnnnnnnnnnnnnnnnnnnnnnnnnnnnnnnnnnnnnnnnnnnnnnnnnnnnnnnnnnnnnnnnnnnnnnnnnnnnnnnnnnnnnnnnnnnnnnnnnnnnnnnnnnnnnnnnnnnnnnnnnnnnnnnnnnnnnnnnnnnnnnnnnnnnnnnnnnnnnnnnnnnnnnnnnnnnnnnnnnnnnnnnnnnnnnnnnnnnnnnnnnnnnnnnnnnnnnnnnnnnnnnnnnnnnnnnnnnnnnnnnnnnnnnnnnnnnnnnnnnnnnnnnnnnnnnnnnnnnnnnnnnnnnnnnnnnnnnnnnnnnnnnnnnnnnnnnnnnnnnnnnnnnnnnnnnnnnnnnnnnnnnnnnnnnnnnnnnnnnnnnnnnnnnnnnnnnnnnnnnnnnnnnnnnnnnnnnnnnnnnnnnnnnnnnnnnnnnnnnnnnnnnnnnnnnnnnnnnnnnnnnnnnnnnnnnnnnnnnnnnnnnnnnnnnnnnnnnnnnnnnnnnnnnnnnnnnnnnnnnnnnnnnnnnnnnnnnnnnnnnnnnnnnnnnnnnnnnnnnnnnnnnnnnnnnnnnnnnnnnnnnnnnnnnnnnnnnnnnnnnnnnnnnnnnnnnnnnnnnnnnnnnnnnnnnnnnnnnnnnnnnnnnnnnnnnnnnnnnnnnnnnnnnnnnnnnnnnnnnnnnnnnnnnnnnnnnnnnnnnnnnnnnnnnnnnnnnnnnnnnnnnnnnnnnnnnnnnnnnnnnnnnnnnnnnnnnnnnnnnnnnnnnnnnnnnnnnnnnnnnnnnnnnnnnnnnnnnnnnnnnnnnnnnnnnnnnnnnnnnnnnnnnnnnnnnnnnnnnnnnnnnnnnnnnnnnnnnnnnnnnnnnnnnnnnnnnnnnnnnnnnnnnnnnnnnnnnnnnnnnnnnnnnnnnnnnnnnnnnnnnnnnnnnnnnnnnnnnnnnnnnnnnnnnnnnnnnnnnnnnnnnnnnnnnnnnnnnnnnnnnnnnnnnnnnnnnnnnnnnnnnnnnnnnnnnnnnnnnnnnnnnnnnnnnnnnnnnnnnnnnnnnnnnnnnnnnnnnnnnnnnnnnnnnnnnnnnnnnnnnnnnnnnnnnnnnnnnnnnnnnnnnnnnnnnnnnnnnnnnnnnnnnnnnnnnnnnnnnnnnnnnnnnnnnnnnnnnnnnnnnnnnnnnnnnnnnnnnnnnnnnnnnnnnnnnnnnnnnnnnnnnnnnnnnnnnnnnnnnnnnnnnnnnnnnnnnnnnnnnnnnnnnnnnnnnnnnnnnnnnnnnnnnnnnnnnnnnnnnnnnnnnnnnnnnnnnnnnnnnnnnnnnnnnnnnnnnnnnnnnnnnnnnnnnnnnnnnnnnnnnnnnnnnnnnnnnnnnnnnnnnnnnnnnnnnnnnnnnnnnnnnnnnnnnnnnnnnnnnnnnnnnnnnnnnnnnnnnnnnnnnnnnnnnnnnnnnnnnnnnnnnnnnnnnnnnnnnnnnnnnnnnnnnnnnnnnnnnnnnnnnnnnnnnnnnnnnnnnnnnnnnnnnnnnnnnnnnnnnnnnnnnnnnnnnnnnnnnnnnnnnnnnnnnnnnnnnnnnnnnnnnnnnnnnnnnnnnnnnnnnnnnnnnnnnnnnnnnnnnnnnnnnnnnnnnnnnnnnnnnnnnnnnnnnnnnnnnnnnnnnnnnnnnnnnnnnnnnnnnnnnnnnnnnnnnnnnnnnnnnnnnnnnnnnnnnnnnnnnnnnnnnnnnnnnnnnnnnnnnnnnnnnnnnnnnnnnnnnnnnnnnnnnnnnnnnnnnnnnnnnnnnnnnnnnnnnnnnnnnnnnnnnnnnnnnnnnnnnnnnnnnnnnnnnnnnnnnnnnnnnnnnnnnnnnnnnnnnnnnnnnnnnnnnnnnnnnnnnnnnnnnnnnnnnnnnnnnnnnnnnnnnnnnnnnnnnnnnnnnnnnnnnnnnnnnnnnnnnnnnnnnnnnnnnnnnnnnnnnnnnnnnnnnnnnnnnnnnnnnnnnnnnnnnnnnnnnnnnnnnnnnnnnnttgttttgtttgttttgattactaagttgtccatcagattgtcatgttttaggactattgtcagttttagagagttagagaatttattaagatttttctgccacaaaatacactcgccttaccaccgtttttccgtcacataaaaaccgaatctgaggttatctagatcggcaaatttgcttttcattgcgagtatgtgcagcaatcaccttgattctaggcataaggaacagagacttcaggcatcgtgttcttaaaaatagcattgctaatattgaatcagatttctgtaaccttgggagaaaaacaagacaattaatacttaagcataaatcgaaccataaagactgaccccgcagccccacctgagcacttccctatatgacgttcgttcccaaggttgattaataaattaataatgtcgctgtagcttcttttaacctcatacccaccccactgattgtctaagtccaggctataatgccacaggaaacagttcgacctgcatttgagggccgtgagcgcccacttctttcctatggccttgcctttcccgcagcgacagcacgccatcttgatgacatattccaggcttcccgtgtatatgtgatttgctcagggtcattggcgcgtaataccgatgtaatgaaccagctggaggctgctctggggccagataagctggttggtcattggatcggtatgcgaagccacactttgtggtcagaggtgctgcagattgccgaagaggttaggactgtgcatgctgatctgctattgaccgttggagctggcagcttgactgacggcgccaagatcattgcattagtaagtatacctttttctttcatatcttcattctgtttctgtttgcggtcttcttgtctcttcttatcattccctggaagacctatatatttatttaatatcagcctaacatccccttcaggcccttgcaaatcaagtcagtacactagaagagctcgaaacacttgcagaaggccccaaaaagcgattgggaatcaaagctccaacgctcccgattatttctgtgccaacatctctctccgccggcgaatactcaaacttcgcaggcggcaccgaggaccgctcaaagcgtaaatacagcttccaaaatccaattcgcggaccggagctggttattctcgacccggagctggcgaaaacgactcccaattcaatctggctcagcacaggtgtgcgcgcaattgatcattgtatcgaaaatctgtgttcgacatcaggtaccactccggaatcagacaaactggctcgggatgcgctaggattgctggtccctggtctcttgcgctgtaagaatgaccgatcagaccgtgaggcgcacctacagtgccaacttggatcagtggatgctatggcagcctgtactagtgggtcaatcgaattgggtgctagccatgggattggacatcaggtaggcgattgctttcctttatttacattataagaaacccacaatgcaccaatgggcctggcttacagttctctagcttggtccactgggtgtcggccacggtgagaccagttgtatcctgctacccgctgtgtgtaagttcaatgctaagtacaacgccaaccgagaaaaacaagctagtgtgtgccaatttttgattcaagatccggtcgtgtcggaggtgctacgtgcccgctcggtcaacgtggaagcctctgacttgggcgatattttggatgctatcatccgcgaattgggaatgcctcggtccttgagcgatgtcaaagtagggcgggatcagttggatggactggcggagaatagcctacatgaccgttggtgcaagacaaacccagtaccactgaaggagaaatcccaggtactggaaatcttggaaatggtagtttaaagacgagataatatgctctttcacatttggataattgagacatccacggactaatctcggctttcaaataacccacctatcagttcagttgtatggctgaggtcataggggctttatatacttccgatggtgatgggattggcatatcgacagatatttctaaatgcgtcgctgtttcaggataacaataatagccgtcacggtagaaaaggcatgcatttatcaagtttcgttcaagtttctaaattacagttcctagttttggtggtggcaacgtcctatatctacactgagacatgtagacatcctaaccacttgggtatttccaaccctaaatgcattatacaacatatctttcattctacaatatctaactaaaatacagattaaatatgaagcttgggagcctctttcaattgattgataagcaggactccaccccccacatttcacgttatacataagctcgcgtcatttccgtctctaggactgcactgtcgacacagcaactatatacaactatgtctctcgccaagaatatccttctattcggcgcaacgggcaacattggctctttcatcctggacgccatcttgaccgagcgctcccaattcggccgcgtcgccatcttcacttccccgcacactgccgaaaccaaagcctcgcagctgaataagctgaaagagcaaggcgtagaagtgattgtgggtaatgtcgaagatgagaatgccgtgaaagcagcatacgaaggtagcaaaccctctcttcgtatccctacttatctaactgcccaaaccaccaaaccaaagactaaccactaagtcgaacaggaatcgataccgtaatttcagcactgggccgcaatgccctagctcaacagatccctctcataagactcgcagccgccagctccactgtgaaatggttcctgccctccgaatacggcacggatatcaagtacgggccagcttcggcgaacgagaagccgcaccaactgaagctgaaagtgcgcgcatacctcgaggatgagagctcgcgtgacgacctcgcctattcgtatgtagttaccgggccgttcgcggagatgtatcttaatctcgtgcctgggttggagacggctggtgggtgggatgttaaaggtcggagggcagttctattgggcgagaaggggaagggcgaggttagtttgacgacgatgaaagagtaagatttcttcccttcactattttggtgtttgtttcgttgggatggatgggctattggctaactattccgctagcgttggaactctcgtcctgaacactctgcttcatgctacggctgagacgcggaacgctgccttgtgcgttaattcgtttactacgagccctgaccagattcaggcggaatttgaacgccagcttgatggtcagccgtgggatgtgtctcgcacctcgctggcaaagttgcgcgaggcggaggctgcagcgtgggaggctgggaatccggcggctactctgttgactttgcgtcggatctggggtgaaggcggaacactgtacgcgcagcgggctaacggattgattggggagccgaaggtgatgagcctgaaggatgtggttgcgaatgagatccagagggtatcgaagttgtagatagcttgtcttcattgtttcattttttttcattatcttaatttttacatgctagttggccacacaacaaaggcgacatttgatctacatagacatcgcgcacactgtggaatccaacgtttaaagctcatcgcattcgtacgtaggaactaagaataaaagaaacatatcgggggttcaggtaacttcagatttcacatgaccgaggggaatgatttggaaaaggataaaaaagggggaaaagctctgccggatataaaacaaaaggatctgagctttattggaagaacttgcgcactctttcctggctagccgggtccacagaagccagaatctggtctgcatttgcgccggttacttgcaccagctgcttggcggatgtggccacccgggtagcggtctggccctgcagagtagccgcctcgagtgcctgaacgatgaaaccgaagacacggtcagccttggcaaagacggccgggttgtgcctggtagtaagatattagcatgagtatgagggtcttcatcaagaatacttactggtcaatcaactgtgcaatgaaggaataggcataaggagcagcctcctcgtcgtaggtaatgggcaaagtctcgatccagttggccacgacatcctgaggagcctgaaccttggacgggttgtagtgcaggatcttggcaatactggcagatgcattctcggtcgcgaacacattctcctctgtgcgggattgcgcatgctgtgtaacctggaacaagctggggaggctggctgccacaaattcgctccaggcggcaccacccttctgtgcggccacaccaactccatacgccgctgcctgacggttagcggcattctcatcccgcaaaccggaagccaaaggctgcatgatatgatccttgtatgcccacgactcttcaccacagaactcgagcacgtcatccatgatgcaaagagcccactgccgttgtgtcgggtcctggcttgtgataaaagcgtcgtagaatggaatcaattgctgccaggtcggcaggaacgtgttgccctggttcttaaagatggtgtggaacgccttgttcatatcgctcaataggttttgatcgtcctccacggcgtactcaaagtccaggttttcctcgtcaccatcttcaagctcagcctgctcctccaaacgttgcttcacgcgcatctggtagtcctcaagggtcgacttcgccgattcaatgaacgcctgcaagtgctggggggtgagggagtttctgccaacgacctctactgactcgtagaagcactggtacatctcagccagcgtgtcaaccgtcggctcagcgctcagaacctcgatgatcttctcggcaaccttgttccacatttcggcaaagcccggcgactggccaccgtgtgccttcttgtaagagttcaggagctggggaatcagcttggcagcggacactcgaacggggtcgtggaagaagaaggcaagaccagggactgcgatcttctccatggtttccaggacgtaaggctcgaagttctcctcgagaatttgggcatagatcgtgatcaattcgatagcggtattcttgtcttcaagagcactggtcttgataccaataatcttgcctttgagtggcactatctcccagccatcatcctgctcaacctgttcgatctgttcctcatcatctagcagctggatatcggccttggcagcagccacggtgagaagaggcggcataacaccggggagataaggtacgaagtctcggcctaagacgcggcacatgcggccccagcagtgaaggaggtactgtgactgtgggtcgtcggcgtcgacaatgttttgctgaatgtggccgagaatctgcacaaggttcagggcgtcttgacccatcttctccttaccaacggccagtgcgatcagagtagcacactccatggccttggcacgaagaaggcggtactccttaccctgttcctccttgagaacattgagcaaaagaggcatcaaagtggtataatactggtcgaaggcggcctcggcagaatcagcaatagtggcaatagtggacagcgcctgctcctgcagataacgcttagggctgcgcaagagatccaggagatggctgagaaggtttccgaggtatggctccaaggtgctgcgctccgcctcctcgcagaaattgacaagagcagcggcagcgtgggactgcacacgcggctcggtagaggcaagaacgggaatgatgttagtgaggacaatctcgtgatacttctcctgcatggtaccggcaaagtcggtgctcatctgaccaagagcattgcagcctgcataccggactcgggggtgagggtcttggagggcaggaacaacaagcgctaggacttggtcgagttcaccgaccatcaggtcgcgacaaccttcggagatagcggagatggccatcaaagcagcatggcggtcgcgccagttggtagacgacatcatgcgaggaatccaagagaatgcgggctggaggatggcctgtccacccaatttgttggcgagacgatccatgcactgctcaccggcgatgtggttgagatcgttctcttcaggctcaagctgttactggtcaatggcatgtcaattataacgacagaaatgccaacacttacatcttcagacgcgttccattcctccgcatcgtcgtcatccgcaccgacatcagtcatcagactcagacattgtgtgaccatttcctgtgcgaactccggctccttcctgcacatatttggggcgtaatcggcaaaggtggccatcaattcgagtgcgttctggcgcacctggtcactgagctccttgtcgccaatgacactaatgctgaacttaactaagttgttgaacatgaccttgaacatctttgggcagatttcagccaattcgatcagggcttggagtgccgaggacagttcctcgctctcagaggactccttgagaggaggaaggatgttgagaaggtctggcatgaggccgaagaatttaggctgggactttctggagattgaccggaacaacgaagcgaaggcttccatagctgaaattcgcacctgatgaaatggtcaaaattgagttcgaagggcatatccagatgtcgacatacggaaatattatcgtccttgaaacccttggtaaaaaccgccacaacagcgtcttcgtgctgctgttcaatgataccgggggtggtcgtgaacacacggtatgcggtttcccgcaggcccgagtcagggctctggcttgcctggaatagaacaccgagaagttcgggccactgttcgtctacaatcacaggtgaaatcgtcagaactaagagtcctcattttgtcaagggttgttcgaatcgcataccattatcggtgtattgcctcgccacctcagcgagtgtgtctccaatcttcttgcgtacatcggtgacggtctcactggttagacagatcaccaatttctcgcggatggcgattcgctgctcgttgggtaggctcgagaaaatctccctgctgtcacctgtggcgggatccttccgggtttttgtcgcgattcttcggaaaagcacagcggcgaaagcacgcatctgtaattaaaggtctcccatcagttattgatcccaaatcacattgaagttcggctgctggcctggtcgtcgatcgtttgcaacaccactccttcgaagcagccacacccctggagtccggtgtaacttactattgtgtcctctgcacccccaagctgttccgccaatcccatcaagaggacatctggtcggttcagaacccagtcattgttaagctggtcttccgcctgggatctgacgacattgtcgggcgtgctcaagccgcggagcagctgagaaagcgcggtgtggacttcgggaggtaggagggacatgttgggcgtgtctgttcccaagttccagacgatccaagcaacccagttctttcaaccctcgtagaagtaatttggtggggatagaggggtggaacgaaggaggagttttgtttttggtggggcggggagagagggaaaaaagaagaatttctgatggataggtccttggaagtgaagaagaacggaagtgccagtcgaataacacaacaagagggagagagattcgactgaggatatcgaggtcttagaatcgggtacttctcgacaaagattgcaaattaactgcacgaaaatccaaggacaacctacaaaagtccataatcgtatctggagctaagccaaatgcggtaatttaaggccacaaggccaactcagatcgaacagacacaactatgaagacctcaaacaacttacttatttgtacatacaaatcgttagatcaaagtcgacctcgaacaattatttgcattgaaggctaaactacctaggtaacgccgcaactgctcatacgaacagcggtatctgaacgcgacacggaatatcgatattagaaaacaaaacgggtatgcaacactccggacaggaaaagaatctactacgctatctcaggttgcttgatatccaagttgattgagagaaaggggagtttttgaagaaagagggtttcgggaatgccaaatatttttaccggtgaccggggcggctgagaatgaacacacccacaataaccgcagccaatgtgacaatagcaccgggcagcagcaagtcgttggggacaccggcaatatattgctcctctggcgcgtgcaagggcacgacttgtggctggggtagggccttgctcactggggagtcttgtgatgtaggttcctcagcagagctttgctcttccataggagtcacaatcttaacatgatgaggttcaaacacagtgttaggtgcctgggcggggtcgtggacaaataaattgaccttgtcgcggtgagtgcggcgggccagatcgatggcatccgtcatatcctggtccgtggtaatggagacggtatcgccttcgttgtccatatagctgagggcatatccagtgtggctcagccgaccctcctcaacagtggcctcgccaccaacatcctcgacttccttgccaagtttcgccgtgacttgcaacacaaggtcggtaatgccgctggtggtaaggacgttcacacggtgcactcgaccaccaggggctttgaacttgaaggggaatggagtaggagcggctggttctattgggtagtgctgagagatagcggaatgatcatcaccgtggtgcgatgctgagtcgttggggagaagactgttgtcgtagcctgagcgagtgaggtcgggactgataactgagcggtgtggggtattcagttgctggctgtggccgccagagaccatggagtctgactcgtgatccattgataaccaaaatttgttccaagcggggccctcgtcatcttgggttgacatggtgttgatctgaatacattagtcaaaatttttgcatgtcagatctgtaactttcaaacatacctgttcaagagtggcatatgtaagcttcaacacatccaccatgccaacgatttcaccaccctcgttcatcacgggcaggttaagatagtggccatctgttgtagagttagcatgcttcggtttgaaccgctgactgaaatgactgaccatgcatcttgcgaagtgcggcttggatgctcatatccgacggggcgaaatcggggtgaggagtcatgacacggacaacactgcaagtagatggatcaaggccaggagcaataacgcgaagaacgatatccttgctagtgaatataccagtgatcgagccttggtcctggactagcagagcagtagtgtggttttccttcatcagagccgcagcgtccttgacggtggtgcggaccgagacagtgaccggcggcaagccatccaagaccgtctcaagagtcggaccggacatcttggatcgcaatgcctccacatattggataacttgctggggctgactggagccaagctctgtctgcacaccttccagcgcatcgtacagcttgcgagacgaactgtatgcgcgctccaatttttccatagcatcgtagaagcacttggtaatatccaaaacaccagagatatcctgattctcatccatgactggcaaatgtctgaatccctttcgcaccataagatcgagggcatcggtagcgctggtgtccgttctcgcgcacagcgggttcttggtcatgatttcagcgacagagacgtctcgcgccttcaggcccattccgacgactcggaacgccagatccttggcagtgaaaatacccgagatgcgctcattatcgtcggtgaccaacacacagtcctctctcttcgcggccataagctgggcggcctctgcgatactcatggtcggcttgatctggagggcttggctgggcttcagggcgagcaccgtaccgggaggcgctttgcgggagctcctcgattttgccggagtattcctttttttgctgaggtcggcctccattttgcggcggatggccttgtgtcgagattagctaaaagccgaggctcaaattgaccatcaggagatcactcccgctagctgccataacgtacctcatcacgttttgactggttctgtcgctgtctgctacttgcggcgctcattgtgccagtgccagtgctagtgggagtcccgacgtcgctagtggctgttgtgcttataacagaggaatctggtctggggggtcgggggatgtgggaagcgctaggatcgctcgcgaaatcgggcagccttcctctcccgatcgtctgattgggtttcccccgaaaagtacctgtggccgacataataatgccgaaaggggaaagtctcagtaaaaaaaaagagagaaaggagatgacacaaacagaacaaggatgtcaagttgtgagactggtatgggagaaaaagcaaggagaaatcctaggaaggagaagaaaaatgggcagttcaatagtcgatcccaaacaggggtgttccttcgttagtcggggttggaggaaccataaacacggagtgacacggtacgatccggacgctagtctgaattaggcgaaaatactgctcgtgaccttttacacatgatccatgcgatacacgtgatccagatatatcatcgcctgagatttgaggcatcagccccgtgacccatctcgcttaagggcttagggctacccgcacaacggaatccaatccatcccgaaagagactttgtgtgagcgagcttcgacaacccactcccgacaagtcaactgtacgctatctacccccccctttcacccacagaccaatacctaaccatccacagaacaaaccgtcaaaatggtcaagaagagggcgaacaagtaagaccaacaaatccccccatctcggcgaaacagtatcccattcgacatctccgcaatgacgccgacggaagcgcacacgacatacatctctaaatacatcgaaaatcgcgacctacgcacattgccggacaagaagaatgggagactggatctcgattgattcgcaacctcaggggcacggtaactaattgatttgatagcggccgcaacaagaatggccgcggccacgttaagcctgtgcgttgctccaactgcgctcgctgcacccccaaggacaaggccatcaagcgcttcaccatccgcaacatggttgagtctgctgccattcgtacgtgacaactctctcgatacctcgaatatacgacaagatctcaagatctatggctacaaaccattcgaggactttcagatgtagcagtgcaactaaccgttctcgctttacaggtgatatctccgaggcttccgtcttcgccgagtacgctgtccccaagatgtacttgaagctccagtactgtgtgtcctgcgccattcacggcaagattgtccggtacgtttccaccgattgccctcctcgatacctagtcgcattccacgtactaattactcgttcatagtgttcgctcccgcgaaggccgccgcaaccgtgctccccctccccgtattcgcttcaacaaggacggcaagaagctccagccccctactgccgccaaggctttgtaaggagatgaatgtcgcacgacaaacaaaataaaatggaactagtttgaaatgaattcttttattttgtcttcactcttcgcattggtgttcttctcaaccggatcgcaggggtgatgctcggtcccaaaactgccggccatgcttctacactgaggatgaaaaagacggcaccaattgtgcgacgaaggcaagttggatgtctctttagcattgtgacgtttatgagcccgtttacgacggcttgttatgactgggaggaaggatggttcaagtccaagggaggactcagaaaatatcaaaaattcctacaaaacatgatcgcgtgacgtagacatcaattatcttgagtagctatgtagtattgctgggtatctgccaagtacgaaatttatgggtacaggtaccctttctcaaaatagtttccatacatatctaccgttccggtccgcaccttcggcattgggccccgcacgaccttcacctctcccttccaatggccttcgacataatgggagagagcaatatggggtgatgatggcatgagtaggctactcatgccggaagcacccgtgccaaccgtgtttcgccgccctctctcacgtcgaatcacctgctcatactcagcctttttgcggcgacgaaaggtcgcaagctctgctacaaggtcaatcatcgggacctggcactgttgctttctatctctagtagctcctgttggaccaggggtctcagcactttgtggatggtgacgcccgagtcgagaagaatcaggtgattgcaacgaagaagaatcgggtgaatacaacgaggcactctccgacggcataagcgagaccttttcgttaagcacagccatgggaaagtatttgccagggtcattttcggggactccacactcttcttcaccgaagaagctgaaatcatcggcggctgcagaccaaagattctccgagtcgcggtcaccagtgcttgaatgccctgtggcattatattggttcccgggtttccatgatgtcagcttggaggtatcaacaggtttaatttcaagaactagacgccgcaagccaaagagagatcgcgagcgccgctgctcggcttgcatgcgtgcttgccctggtgggagggagtagtctgatcctgcttgtagagttgctagtaatgcttcgtttgagcaggcagtaatgaaccgagtgagcgcagaaagtattgaagagttaggcgtcacatgtgatggtacatctgtcagcaccaaagattccatgtgaggaatatgtgatgggtgtaggtaagggaaccagctttctcttcctccttgaagtgggattgattggttacgtggtcgctttgccaacaattcctgtactgttcgtgcgagagaatcgttcggcgagattggggagctgcattgcatggttgcctggagagagaagtctgccgcaagcttgtcgcagtctgaagccattgaaatggatggcaaggtgcttccctcggcctggtctgtatcccatgtatctgtcctagcactgaagaccgtaccttcgttggcgctactgtgtatagggattggctgtacgacctccggagcaaaagctgatccacgcctaaccgacgggccaggctcgtcctcataggatttcaatgtctgggatgctttcaacctttctgtcatggaagatgagctaattgagtcggtcgttgatgtatctgcaagttcaaagacaggtcttgtctcttcgggcaactcataaacctgctgggaggtatccagctcaaattgttcgacttcgcgggggctatcttgtgctgaaagctctggaagaaacttatcattggatgaagcgtctttagtttgtgattggcctgtgagaacagcatgatgcgctcggaaatatatcaaattgtctcctgcaatcttacccaaaattgggactagcttttcggctcccgaatatttctccttccgataatgatgcgtgtgatgtgccttatccggtggttttatggtcccgaaatcgagagcatatagtcgggacgagaataaaagattcgccacagcttccagagatatttgattgccagtaatataaagatgtgtgattcccgtatgcggcaagtcttcaacccatggatgaaataaaacaggctgagcgagaagcttcgcaaactggtcatccaagtccggccgcttgaagaaatccgagccagactcattgattgcaaagtgcgagaagggatctggagaagccgtggcctgccttggactctcttgcatttctcttccgtctggcgggagaaaggatgactgtagcaggaatcgaattgccatgtcagtgagcatgttgtctctcaaatccaaacaacggactcgttgtccaatcgtattggctagaaattcggcgtcatcatctttcagcccaataccacgcaatttgagtatccggagaaacggcatctgagctagcgtagacagtacattgcggtctcgtgctggggtggtgtacgaaagatccaggtaggtcaatgctggaaacaagaggagagtatttgcgagacttgtggaagtggcattcggctcacgttcagccaacaagagccttatattgtactggttggacatttcatggggtttcaatgctgtcatggcatggtggtcaaagaatggtaacttcgagaccatcagacactgaagacatggcagacattcgagaatgtccctcaaccagcccggtcgcggaccaccatatatctccgagagagcgggtggaagatgaagggtatgggttaacgctcgcacctcttgtcgggcatatttgagtgttcttcggaatcgcgtgagagccactgtatgatccagtcaggtattgctttttgagcaatcgctgttgttcataagtttacttaccatagactgcatcattatctgtaccaaagtgagatgcaggattaccccagaggaagggcataaatagaccatgccatctgtggcagactaaagatgcagcgcataggtcgctggaagggatatagcgagcaataattgtccaagcatctctgtctgttgctgattcgtaagaaggaggaatgatatccatcgttgtattattttttccttctttcgatcaaaggcattgtgagttatacgaaaggtggtggaaatgcgagagggagtttggccccatgagtacctaggtagttgcccgactcagccacatagttagttagttctacgacagccttttgggatataccactggactcaggactccgaatattcttcataatgtttatgctttccccccctctcgcttctggctatctataagtatcatggccctttatccacgactatggatatatgacgtcactaaataaagcaactatgaacaggcgggggatagccggtctttgccctaatcctcacttattcctctgccacgcgcagagcccacagtgcttgggagagacttgaagcatattctacgtagttttgccggtccctactctcaacaaagggtagttagcatttcatccattgtcgcttagcatcacgcccgaaaaatcaggcataaataccccagagccgggatggtagcttactaagcatgaaactgagtcagcaagtgaccacgacttctcgacttgcgttgcggccattccggactcgagaatactcacgcggtcctcgaagtgcgatcgagggcttctagaagcagtccagaatatgtcagtgaacagaccccttgttgattccacttccttgtagccgaggcttccttgttacttgttattcttgtactcacctatgcaaagatactttggaatagaatgtatcccactaacatgtcaaatagtcgtgtgattagcaacctcccccagaggttcaccttaccatgtctgaagttcatggagattcagagctcgttccatcgggccctgatctagattatccgcttgctttggctccgcgacaagtaactttgcgagatcgggttaccgttgcgaccctgatcccttttacttcagcagaggaagtaccgcgggctctaatgaagtatctctctgaccaattcaacaaagagattgaaaagggagatacatatgctatgaccgagcccatcccattggctcagttcggacgatattggttttcgaactttggtgtggtcatgcttattggcgacatcgagagtgcagagcagacacatgcgatggaccgtgctggagcgaactggaccaagatctgtctaggtggttttcatattcgacctaattaccccggccgtagtagtcatgtctgcaatggcactttcatcgtcaccgatgctgctcgaaacaagggcgtgggtagactgatgggcgaatcctatctggagtggtcacctcgactggtgagttattcaccacgatcgcttcaaaagggctatgaattaatattttctagggatatacatatgcggtcttcaacttggtatatgagtccaacgttgcgtcatgtcgcctgtgggattcccttggctttaaacggattggccgagtccccggtggaggcagtatcaaatcacaacctggggagtacgtcgatgcgatcatatacggtagaggcctcagcttggatggcgaggattctgtgtctcaggatcgttttgagaaaattcggtattatttgaagcacgggaagtaccctcgtggtgctgaccgggccgaaaagagtcgccttcgcagtgcggcgactcattataaacttcttggtggtgaggatggggagcccgagaaactgatgctgaaggataaggaggttgtgtcagacccgcagcagcagtacgatatcgcccaagaagttcacctcaagcatcatgctggaatcaacaaaaccacagcagctattgcgatcaaataccattgggtacgaatcaaagaaaccgtcaatcgcgtgattcgagactgtccacaatgcaaagagactctcaaggtgccccccataccagggaccaaagatgatgataaatcgccatcggaaacgatgtctggcatggatatggatagcacaatggagcagcccccgaaggacccaatcaatgtcccgcaggagatggacgaagcacctgatgagcctcccaattacaaccctcttatgcaccaacccattcctgcagctatgcccgatacagtccactccatggctgggttcgcacccatgcctctcgatcctcaaatcatgcaactacatcaacagttacgacgctaccaacaacataactctatgacgggacagttcgccccaaacccacacaatctcagcatgtcaagctttgacgacgcaatgcgctaccatacagccagcaatgcatatcaaatgatggtagatgacggctcggatccctttagacaagatgtgcttggacttgtaaacccaccctcacacgagttacagcatgatgctgaattactcgccaagttcgagtatggaagtccttcagacggaaattatgactttacgtgaacacgcctcaacttttatctcggtttctcattccgagggagttattgcatttcgggtttgctttgtcttaacttaaatttttctacctctctcctctattgttctattgtcgaccttcgaagccatccgtctgagataccgctaacactctaccattgtgccgtggacagtgaagcgcgctctctgctacggtatgctttttattgggcatattattcaaaagattatctctatccatattttaaaaactccatattcaatccatagatgtaaattctgtacatctcttcaaatgcgtagggtcgaggagccttgattggtcaccgccttgcgcgactgggggggcttttggggaacagaagctctgggaaattttggcagatcaacccctccgacctttcaactcatcataccccttttcttatttcatttatttttttattgaacggtttcgtgtcctaataccgatttaatcatggccttcaacggccaaacccccacgattgtcgtgttgaaagagggtacgtgctgtttccagtgcgggcagttttgttggtgggattctgtaacctatgctaactactgttcctatacaatctacaggcaccgatgcttctcagggaaagggtcagattatctccaatatcaacgcttgtgtcgcagtgcaaggaacagtcaagagcactctcggtccttatggtggtgatctcctgcttgtggatgccaatggcaaacagaccattacaaacgatggagccacagtgatgaaggtgtgtcttgctattgatgcaactatgtgatcggaggaagttggcgattctgacttgcgtgtattcggtagcttttggatattgtgcatcccgccgcccgcattctcacggatatcgctcggtcccaggatgccgaagtcggtgacggaacaacctccgtggttgtcctagccggtgagattctgaaggaggtgcgagacctcgttgagcagggtgtcagctcgcagaccatcattaagggtctgcggagatcgagcgccatggcagtcaacaagattaaggagattgcagtggacatgatggatgcttcagagagccacgaaaagaaggtcgagacactaagacggttagccgcaacagccatgaacagcaagcttatcaagcggaattcggagttcttcacaaagagtaaggcttccctaccctgtggttgcaggtttggccccgaggctgacgagatggtatcatagtggttgtggatgcagtactttcgctggaccaggatgaccttaacgagaggttgatcggtgtcaagaaggttaccggtggtggtctccaggattcgcttttcgtcgacggtgtcgccttcaagaagactttctcctacgccggtttcgagcaacagcccaaacacttcgagaaccccggtattgtgtgcttgaacgtcgagcttgagcttaagagtgagaaggacaatgcggaagtccgtgtcgagcaggtctcggaataccaggccatcgtcgatgctgaatggcagatcatcttcaacaagcttgaggctatctacaagacaggagcgaaggtcgtgcttagcaagctgcctattggcgatcttgccacacagtacgtgcttgctattcactatgaggcatgtgcctagacactaatgatttaatttgcaggtacttcgcggaccgagacatcttctgtgctggccgtgtggcctcggacgacttggaccgtgtttgccaagctaccggtgccgcaacccaatctacctgcactgacatccaggagcgccacctgggtacctgtggcgcgttcgaggagcgccagattggtggagagcgtttcaacttgttctccgactgccctcgcgctaagacctgcactctcgtgctgcgtggtggcgctgagcaatttattgcggaggtggaacgtagtctgcacgatgctatcatgatcgtcaagcgtgctctgcgtaacacaaccatcgttgctggcggtggtgctactgaaatggagttgtcgagctacatgcacgggtttgccgaccgtaacgtcccgcacaagcaacaggccgtcgtcaaggcattcgccaaggctctggaggttattccccgccagttgtgtgataacgctggcttcgacgctacagatatcctgaaccgcttgcgtgtggagcaccgcaagggtaacacctgggctggtgtcgacttcgacaacgagggcgtccgtgacaatatgctggcctttgtttgggagcccagcctggtcaaggtcaatgctatccaggccgcagtggaggcctcttgcttgatcctgagtgtggatgagacgataagtaagttccttctctttgctttccatcctcggaatcaccactaacctatgttttctttccaacagagaatgaggaatcagctcaacctggtcaacagcgcggtatgccgccaggtgctgcccagcgcgccctccggggccgtggccgcggcatgcctcgacgaggataaacgagtttgaccaaaattggatgatgctcgatgatattccccccaaaaaaagaaggacgtctgcatgattgagggccacaagcagttgaagcgaactctgcccaaagccggtgtttgtgagatgaatattgaatatgaagtacagggagaatagaagacgagttgctagagatgacccgagtgaaccacacagtctttccaggtacatgcaatataaacatagtcctcatgaaagtatttcctcagacttgatcaattgcaggtgatatatcagatacactttcttaaagccgagctggtccgcgctacgacggggtcttatacggatcctaataatatctacggagtagtccgtacgctgtaccccgtgctattccgtattttatttagaatctctgtctaggtagctatattccaaacacttccacccgttttacatcccattggcccattttcggcgccaagacagtgctattgaatctccttcagctgtatgacgcgcagaaaggggatctatttggtataaccatcgtgtgtgggatctagttagttagctagttatgtgtgtgctttgctaccactccgtagatactgttacaaaatgatccgaacaagtacaaaccttcaataaagtaagtgaggcccaatgaccgagggtcttgggcttccaggggttgatcggagctgccgatgaacccatgtcagatataaaagttagttcggattatgtcgtgttgatttgttgatttttttttcttcttttcttttctgttttcccctccttttctctgttttctgtttcttttttggttgtcttagtgtctagtgcctatccgaaacagccttataaggaaatagtggacgccgaacctctttgtaagtggcgagtttctagacgatccccgccaaattatctctggactctacaaatccccgaactgttcggacgctttctacttgatctcattctttgcatattttacattttccttttcagaatttatcttgctctcttcaaggcttggcttggcagctgccgtactcccgatctgttctgccttggatcttctcttctccacattcaacatcgcgttctctcctctacatctttacatttcgcttgattccctaggtggacttggggatttctctgatgtcttactatccaccgtactcgggcgcgccgggataccccccgcagcagccgtcatatcccccgcaacagcagtacccgtacgtttatccctttgctctattgagaacctacccgtctgacaaggatttgattgcagacagatgaatcagcagcagccctcttatggcggctatcccggccagtcctaccaccagcagcatcagccgccgccgcagcagcaatccaacccgtatggttacagccattcgccccagccatcccagtcctacggcgcgcctcctcctcagcaaggctacaatgtatgttatgatgagttttgccttgaatatacacgagattgacatgtatcaatcctccccaggctccgccgtctgggtacaaccagcacgccaaccagcaccctgggcaatcaatccaaggaagaccaggtatgcctaccatttcccagcttgaaaccacatcgctagcagtgaaagctaatcaggcggaaattaagcctacggtcaggccggcggtccgcttccccctcccagcaaccccgtcgccttcggtcacggcgctccccaaggctatagcttccaatactcccgctgtacaggaaagagaaaggccttgttgattggtatcaattatttcggccagaaaggtcaactgcgcggctgtatcaacgacgtcaagaacatgtcgacctacttgaaccaaaacttcggctatgctcgcgaggacatggtgctcctgactgatgaccagcaaaatccgatgagccagccgaccaaggcaaacatacttcgggctatgcactggctggtgaaggatgcgcgtcccaatgactcgttgttcttccactactctggtgagtaaaatgcctccatcgctgctatagcggtgaactaataagaactcaggtcatggcggtcagacacccgacttggatggcgatgaagaagatgggtacgatgaagttatctacccggtggacttccgggttgcaggccacatcgttgatgatgagatgcaccgtatcatggtgcagactctacaaccgggagtccggcttacagcgatcttcgactcctgccactctggctccgctctcgatcttccctacgtctactccacctctggtgtgctcaaggagcccaacttggccaaggaggctggacaaggcctgcttggtgtggtgtcggcatacgcacgtggtgacatgggcagcatggtgtccaccgccatgggcttcataaagaaggccaccaagggtgacgaagtgtatgaacgcaacaagcagacaaagactagccccgcggatgtcatcatgtggtccggcagcaaggacgaccagaccagtcaggatgcccagattgccgggcaggctactggtgccatgtcatgggctttcatcgcggcgcttcggaagaaccctcagcagagttatgtccagcttttgaacagcattcgtgacgagcttgcgaccaaatattcccagaagccacagctaagctgcagccaccctttaggtacgagtctcggattacttgaccgcaatcaattctgacctcccctacagatacggacatcctttatgtgatgtaaatggacttggaaatgaagataagggacgatgcttgtctggctttcaatgaagcatgctttcgtgtttaatgaattgccatgtatgtaattccaccatcggtgttccagtgaatattttgcctgtgggtggcgcactatttgtgattaatccttatgagtccttcttatgcgttgaaaatggagtgcagattagctaagcgtcggtctggaatcatcgtagacaactgccctgggcatctgcacaccaacacatatactctcactacgggaaactgcagttagcttcgttatctcgagaagatcaaggctccaagctctcatcaactatgtagacatgttcaactcgatatgatgggatccatcattggcggaagagctgaccgagtgatatggatggtggcgctgtacggattttataccctcaggggaccgtcatatgtcaattttgccccctaggagcccccacggaaattcatgcccccaactgatcttaatattcaatataacaagggcggataccagaaacgcaggacccgaatcaagcacaatgcagtcaattcgccagcaccgcgttctgcgcaggaagctccaacaacaatttgttacaaagcatgagaagcccgacaatgtctggactcacgagggccgctacgagtaccgcggaggagagatccacacagaacctggcgagccgaatgatgacccggctgccggacgaaggagggagcatggccatcgcacttttatatctgggccatccctcaatcctcgccattcagtccgatcacatatagagcgagaaggggatatcgagggctcggagtacgacccggtactctcaaccgatccccataccatcaatacacaagagacgctgggaaatacgcctgatattatggtgactggcgttgaaagaccccggccgtgtgacagtacgggcagtgagactgatatcgagtcattgaaaaagaacgaactcattatcgtcacatttgaaggcgagtgtgacataatggatcctcacaactggtcatttaaatgtcgactgtttacgactattctcacttcacttactggatgtgtggtcttctggtcatccacgatcgattccactgctctcatgacaaccaagcaattgtatcatactacctttgaggtcgagactttgcctactggtacgtggttaacactttgaatcgtttcaactagactaactgagatcatctagctatgtttctgattggttgtggagtaggcgcattgataacagcacctatatcagaactcttcggacgcaaccccgtgtacattcccaccatcatcgggttcattttgttcaacatgggcgcagggctttccgaaacagtggtgcagcgagtcgtctgccgcggtctagctggactcttcgggtctgccccggcgattgtatcagcagcatccctggtggatgtctggtcacgcattgaacgagtctacaccttcccgatctttgcgatattcatcttcacgggtccattggtggcaccaacaccaggagcattcgctgtcagttctgacgcggtaagctggcgctgggtagactggatgactataatcttcgcaggagtcctcctgatcccggttgtgctcttcttgcccgagacatacagcccgaacctgctgtactggaaagcaaaagagctccgccgcctgacaggcgacgaccgttaccggtctcccatagagttcagaaaatccacgttcacccaacgcatgtctacctcgttataccggccacttcagcttcttgcaacagaaccaattatcatgatccactcaatctacgtcgccctcctcttcatgatactgtacaccttcattgcgggctttgtctccatctatgagatgacaagcggcttcagcccggccgctaccgacgtcgcattcctggccattgaggtcggggtccttctttctgtactggcagtccccatttcaatgtggctggtccgtagagacatataccacagccgtgcgaatggcgaacagcgcccggaccccgagattagtctgtacatgggcatgttcggtgcgcctgctgtcccaatatcgctattctggatgggctggacggccagacatggagtctcgtactggagcccgctcgtcgcttcgggattctttggatttgggtcgttgtgtatcttcgtctcggcgtaccagtacgtcgctgattcgtacgagtcgtattctgcaagtgcgcttgcctcccttcagatgctgaggctcgtcgctgctggcgctatggctatagtcgcggagattatgtataaggagcttggcattgaatggacgttgactctctggggtggagtttcgttgttgtttttgcctgtgccttacttgctctactggaaggggtataaaatccgtgcacagagtcgctatgcgcgcagaagtgaacggagttgaggaatgtgtacatggaagccctggagataggggggattttaagttgctataaatcaggataattcagtactactgtcattactaatagtagccaatgactagttaactacatggttatacctacaaaatgactccgatttgccagtctcctagacagtacaatcctcagtatcatcgtggccctataatatcgttaatgactagtcataacgagtagtatacggtaccactcacacaatgcatattaatatgctttctgattgccgatgctgaaggcctatagaccttcctaccgttaagtatattctccccctagccataacaattagtaccagcggttatattgagaaagaggtcgaaagcgcacggtgtgtaagcgcaaacatgataatgaacgtcctagccagtgggatctctctggcagtgatcgcgtcagttatgtgacgaaccgtgttgggcctcccgtagagtagggttcgactctagcttctcggggtttccgttcgcagtccgtgatggtcacacttcttcccgccagctgtcgtgtcacttcgattgaatataactccaccatccacagcttctttcgggtttccacgtgcttcgctcccgacctgtcggaagtaggtagggagcggagcgcctagttaataccgttaccaggctgaggaagaagtcctcgggcgggaagccggttggcttgaggactatccacttcccatccgtaaatctctggagaaccctatcgctgggtgttccccctttcgaagcctgcttcgcccgtttcgttggtaggggttttgctccggagtgggacgaggcgatgctgggcataggtgacatcgtacttggaagcaagccagatcgttgtcggttctcaaggcatcgttgtgctaggagactccgggctgttctcacgggaatttgagttggacatggtagctgtaaagtagagcggttaggcatatgctagtcttataggctggttaaatacgcaccaggtaaaaaccgactcaagttagatgaggaacaaaccactcgccagagaatgaactcctcgtcacaagtcttgaccctggttttgtcggctatatcacagagcccgtccactaagcaaccatcatcaagattcccgcgaggccaatcgcattgcttttgctgttgttctatgatcatgttcggctgtggtcttgggtactatacaacctgccatctggtgcatcctctatatagcgcatcccaaatcggacctcgtccttgtagatataggtatatggtggtgcatgagatctatatatgtctatatagcccgggtggcacagttggcaaggactcagacctctcctagcgttggcgagagttgaaagtgcaccaggagaagggaacatggaagactggtgtttgttcctagcttgagaattgacaataagaaagtaggcgatggattaaattttttgtgaataatctcagatagggaagagctctgtaatataactttgataggaggatgatggcttggataaagggcctttgtttagatttctcgcgtcagcatatctgtgcaaatgccctggttgttttctttctctgcatcaaccctaatcttatatgaatgaacggataaagaaaattggggtttgattctattatatgaacaaaagagaaatgcagcaaattcatctcatttgtgggtgcactaacgctggctcatcgtaaattgggcgccgaaaatggctgtcggcggctggttcaaggccaaagtctgagatttataccttgtccaagatacaccgagggaaaagactaaaacgactttcatttaaggtgcgggaggttaaaggacggacgaatagaataacgtgttaataatagcttagtccactttccgccccacccagtctatacaattgtataaaatgcaaaaggcaggtgggtgaaggagtgaatttgtatgcgttgggagatgacggtgttggctccttggagcatttataatacattaataaagtattattagataatgttaagacgttattaagacgttattgaagctttaagaatgaattgtgttatagctactcacatcgacccaccctttagagcacctatgaactgttatacctggcatcttcagccatcgtgatcgacatttcaattgaaattgaggtcggtctttcggctggaagtgcgattggaagtgcgattggaattcgtgaccgaggggaaggttgaggccggggcccgatcagggaccaaagcaaaaggataattgtaccaagctagatatttcgacgattagatacgtatttgcaaagtcacaattttacctcgaactttctcttgttcaatataactgatccgaccgataattccatcggccacttgcaaatcttcactgtggcaggtaacatgcttcttcaagtttccagtcaggaaagggtgctaagaacagtaagctaagcatcgctccgtaggtgataatctagaagcaagcatgtgttacgcatttagggtctggctctctcacattgctgaccctgcaccctggataacgacaatattgcgcgccaacttggataatcacacggtcatcctcatcctatgttgtatatcatattggtcagcctcttgtatacttcctctagataatcactcatcaagtatcacttgaatgcagttacctaccctttcatatttcggcatcacaagttccccagaagcaacttcacgaacgtaacggagataagcaggatgcttagctagaaatgttggacaggcattaaccatggtgtaatatgactgaggttaggagccaaagaaagcaagggaaatttctttaaaggttgcgagaatttgatggggtagaccaaaatgccgcttgcctaaaaacctgtggatctacaatggtctataagatagggtcacgtgcatgtatcaaaccagtcgcgcttcgactccaaccacgcgttcaacctcaacattcgatgtctgattttgggaaaacaccggccttcgccgtaatctaatccatggaaactgctagaaatctacactgcaatttatcactgaatccatgctagttctggccatggttccgttccgtgatgtccatcatccttgaagacgatcacccccctgcggtgctccgtttcggtcccacatggtaccatgagattccttttttaccctatggattggagacaaccaatgatcaaggatctggatcacttaaacatgcagcaatgaaagctctgctacgggaccagtcggcgctgaagcctgagctgtttgaatacgttcactggtatttggcaaaatacctgtgggatgctctcaaaaagtagtaagtcatcattggagagttttttaaactacttccgcagattcttgagtctgcttgttcagatctgacgatctacgcagcaacaagcagacaatgcacatgtggaaaataatggccagcaattatcctgtacaattttatgagattagtccttactactgcctcaatgctggctgtcccaaaaagccactgagagactacatgggtattctcaatagcgatgaccttcgctggcgtgcaatcctgacgattgcaaccacgtactgtaccgcctcagacttcaccactataccaaatatcaagaatttggttgctctggacatttaccgtgagaaatatgcgtcgaattcccccccgctggatccagtgggcgttagcaacgacttgcaagatggatttgtgcgtggttggattgagtccgaagcactgcagcacctccgaattctcaggctctaccatcaatgtgaaataaccgttgcggcagtgggagctctacgtgagctaccggagctccaacttattgtggcgtacgagtgtaagaatatcacagagacgattcaaaaatacgataggcccgcgaataacatcattcccataaagggatggtcggcctgcagactcgattggtattgggaaactcacggaacgtcaaaaaccatcgacgataatctcttggccttgtttcatgtgtaccaggctagtctccagacacccggagacgagcattcgaaaagaccatcatccttaccaacgaatctcccgattttggaattcaaactaccaactgtggaccacagcagaagagacaagattgttgtccgctctcgctataatgccaagtcaatcgtattgttcactcgagatcctgtgaagcaaaagtttgatatcgagaagcgacgtgcaagagacaagaagaggactgaaccacccgaagggggagatcgtcctgccaagcgagcagtcatgaaagagcggggaccgatggacatttccaagactttaacccagttcttctgatggattgtctacgtaaataggcagagaacatgggttgaatcgcgcagtggaataacacctctgcgtcattttgaagcgatactccaacattatttcgaattttgtcatttggttagcggccataaagcatactacactgaccacagacatgttaaaaactagatgtggctggttcgtgggacttgctcatttcaatctgtatttcatgatgtcctatttaggttatgatatagtctgtttccaaggttcgaaagtgttgtaccttggaaggccaccccacatcacatgaggcgtatgtgagtcagtgctctacagacaatcgaataccctgatcgaattcattgctgcagcgtatggctttgctttgctttgcactcgctgaattttacggtctgcgctagaggaggctgtaaacagcatcttccaaggtcttcatgcgttgattatgccatatgttataatagatctttgtattctgaatggcccgtttagtcaccagtttattctgcatccgagtcaagatctggctcaataacagggaatgtcaaaagcgcagcgatgccacccagcccctcgagacgctttccgctttcatgatctgaactgagaattcgcacatcaccaccctctacatcgcggacgcggtccacaagcgccacccaacgtttacgctcagcgatatcctgtgatcggaacaagcgattcgaaacaatgagcacgccgccacctcggccgacagcaccttgttcaacagcgtagtcaacctcacgggggccataggtcgctttgttggtctccttgcgcagttgttctaggaagtcgtccatcaattttgtttcacgggcatacttcgtatcagccagcagactcttaacggcgggtgactggagaacctccgataaggaattcgtgtaccccgatgtggagtgcacaaccacaagactaggaaggagtcgcttgagcccaggagtcgttgttgatgcctcggattggatgtatttttggaagccagcggcgacgaacccgggggatgcgaggagcacgggccgtacagcttcgttgttggcgcctgaagtaagactggtattgaactccatttgtcgaagaagggtctcgagtgtaactttaaagaacttgttcattccctggcagtatgcgtcgttaatttcgagcccagacaatgacatgacagcagaaactcactttatcatgatcccctcctccctgccgtttccgcggcacagacatctcgatcttttgcttcaatattgtctggaattggccaataaagcagatatgagccagtccttcctgcatcactaccgcgacagcctctgcacggcgtttcccgccctcatccacagcgtccttgagtgactcaattgcaatactgtcccacccgacaccctctccatctgcgccaacctctttctctaacgtaaagttgcgattcaactctagatcgagggtatggaattgtccgattttcgtgtgcggtgtttcgttgataatttgtcctgatacatggagctgagagctctgcgggtcgaagtcgagattcttcacgcgaattacaaggttgagatgaacgcgcgccgagctcgtggacccggtatcctgaactgtggtaactcgacgaattgcgctggcgcgaaggatatcgcctggtcggatcaggttgtaggcgtgccactagatatagcgaattgtatatcagatgactgcggggtgctgagactgaaaatgagggattcaataccatgtcttctggctcatctgggcacaatgtcaccgttccagagccattgtgctcaattttgttcttgatgcaacgcatttttgcggtgatactgcacggttataggctgagggcttgggatggtaaatggcgtgttgttattgcgatgtcgtcatatgttgcctgaagatgcgcagattggagggataacagggttgtatgaaaatgggtcaaatcgtcgagcgctttagaatgctcctgtaaacatggatatatcgaacaaatcaacctaatatgagggcattgccgatgttgaacttgccaaactcaccccactatagaataatgccgtccattaccgcccggtcatcctccaagaatcccacctgttctgcagacgcactcattctgggcgattattttggattttcaatgggccatcagagaataaggaattgcggaatattctaatcctccagcgcatatattaaatcaccctgcgctgccagagtcacgagtcatgccttatcgataaagcctaaccctaatcagatcagattggggcatggaaagttgacgtcaaagcttgcagatgttattattggcagttccatgtggaatatgtaataacctcaatatgtaagccgtcaattactcatctgagccccacgtagcattcgtcagccattgatatagccgcatctagtccccttcatcgtccatccccacttcgatggcgtcaaagctccaagaaacgggcggaaatgactgagccgaggtggtccgtggatatcgaaacctttatctatcaagctaatcccctcatttgccttcttttacctttcaactatcaattcgcacatcatggctcccatttcgctgcagtctacctataagttggtctcgggttacgagatccccgtcgttgggttcggagtgagtatattggccccttagagttctgatatgtatgactgacacttatctacaaattaggtttaccaaacgtatgattatcgctgtataaaacccccgcgacagattatattgacttattcttgaatagtccctccgatgtcactgagaaggtgacccgcaaggccattgaaatcggataccgccatgtaagcaactgcaggacccatgcggcaatcgcttccagatttgaccatcctattacaggtcgactgcgccaaagtctacggaaacgaactagaaagtgcagccgctatccgcgggtctggagttgatcgctctaagatcttctatactagcaaggtgccctcgaaatgcatgggatacgagaaggccaagaaggccatcgaggaaagcatcgccgcggcaaaccttggttacattgacctgtatggatctccttgttctcctgaaataaaacatattagcgaactaacactgtgatattagtatgctggttcacgcgccctatggtggcaaggaagaccgccttggcacatggcgcgcacttgtggaggcccaaaaggcaggccacgtccgttcgttgggtgtgtccaactttgctatccagcacctcgaggagttggaagagtacatcaagagcggagcgggcggacaaatcaccgtcggccagtacgagatccacccatggtgcccacgcgaggatattgcggagtggctgcagaagcgcaacatcattgtcgaggcatactctcccctcgtgcaagcgactcgcatgaaggaaccagttctgcagaacctggccaagaagcacggtaagagcgaggctcagattttggtccgctggagtctgcaaaagggatacgtgcccttgcctaagtcagtgaccgagtctcgcattctggagaactcgcaggtcttcgacttcacgctatcggatcaggacatggccagtctgaagctcaactcgtacgcgcctgtgtgctgggatcccgtccgtgactgcaaaatctagatgacgtcactaaaataatcaaaagcctagcgtatggattggattagggaatcaaattctaagcatctcaaaacacactgaatatagatcaaaatatatagttagatcattgaaaaggtgcagcccaattaggtaatttgttgacttacgcgaccggcacaacgtatcaccgccgcgaaccaaaaacagcatcgacactcccaacgcgttcgggtaagattcaccacagctctctatccccatgatagtacacgcaggaggcagtcgctgccacggttgccctcactatgccggataaaccgcgtcgcgtcatattggagacatccaaagaagttaaacgccggtggcagcgcagcaaccaacgattccagttcaccgcatcccagatcgcacagctagatcgccgggaggagcgagaaaagaaagcgaagaagctacgcgagaaggaaaagaaacgcattgccaacaagaaacggaaagccgagcaggaggcgcaggcccgtgaggagcggaagcgtcgcggcatcccggatcccaatgcccgcgtctcctcgagtcagcctatgctatcaatgttcctaggggctgggaagcgacaatcacctgctgcaccggagcctgcgcctacagttacggagctcgaagcacatgatgacaattcggggagcgcgggtggagatacggaagctgaatcagatgacttggatgaagtattggaaaatgaactatctgagcttcaagatgcagatggcccgaaagagcctgaaggccaggatatcgcaaccgagacccgggcttcatccttggaagaagatgagttctcggactgctcggcgttcgacgacgaagagattttgaaaaaagccgacacggctgctattacacgagcaactgacgaagaaacgaagagcccccctatacccaaggaatcatcctacatacgaccttccccggctgtactcacgctagaatcatctttcgactctttccagtacgaccccgccgatttccttgaagccgaggcggctattatcacacaaacgaaaagtcctggaacgagagaccattccccacccaaggacacctcctctttacaacctcctttgtctgatcgaccgtgcagtagacccaccttggcgtcttcttttggagattcctttcgagacgagactgcggattggattgaagaagtgtttgcacgcggaagcggtgacccttttgacgaactcaataaagaagcctctgcatgattttacttgtacttggtaattcgctacattttgtctcgggtcttgcagctttggagtacctacaatgtatggcgtacatttccctgaagtcttggcattatggagatcgggtccggtccgacagtcgggtgatatccgcgcagttcggatacatcacaaggcccttcggttcgggagactcgaatattttggattagaagagatgaattgttccgtcgggatgaccagaaacagtctagaggattcagaacattgtgtacatttgtcttattattgtagtcagaatcttaccgggaatgacgttacatacctatcattctatagatccccagggctgcccgcttctttattcctttattccttcattactttatttcttcatctctgatcttggatcgatcccattcccaccggactcctaatccacaatgccgttcgtccaagcaaacagccatcgtctttactatgccgactctcaccccgccggccctccccaaaacggcctaacttttatcttcatccacggcctgggttcctcacaaaactactactacccagtaatcccgcaccttacgaagctccaccgctgcatcacactcgacacatacggcgccgcccgctccccgtacaccaatgacacaatcacgatccccagtatcgcagaagatgtcatcggcgcgctggactcgctgcatatcgccaaggccgtcgtagtcggccattcaatgggcgggctcgtagtactagagctaggtgcgcggatccccgatcgcgtactgggcgttgtcgccattgggccgacgcacccgtcagatatgttggtgggggtcatgaatagaagatcggatactgtgcttgagtgtaagtttttcccattcgaagcctgccgtgttgttttatttcatcatgtactaaattgtctgcagctggaatggagccaatggcagataccatcccgtctggagctgtcggctcgcgcagcaccccgcttcagaaggctttcatccgggagttggtcctaggccaggacccgaaaggctatgccgtgatgtgccgcgctattgctgccgcgaagccacctaactatgctgcggtcaaggagcctttcctgcttattgcgggcgaagaggacaagtctgcttctatggaggggtgccggtacatctttgagcatgtctcgagtgagaaaaagtccctcgaggtattgaagggagttgggcactggcattgtattgaggctgctgacgaggtgggtgagttaatcgccaagtttgcggattctgtgaatgcttgaatgcttgaaatagtctctatttagaacggaatgatgaatatgccagtaatcatgtttggctttttggttatcttcaatgctatcccgctatcgtaaagtacatcagaaatcacagaaatgctacttgaatgctgctgctcgctcatgcgccattggtactggtctcgaacttcaccaacttgacatcatattcaagctcagtggcagcttgaggatcgccctcacgcggcacaaagtccacgacaagcgagtccttgacagcaaataccgagtcgttgtcaaggtacttatccttgctgtcgaagatctgcgttgtcaaaggacggtaattatcataggtagcctaggcaagatattagcttctgtctcaacctgatatcgaataccacgccaaacttacaataatgtgaatgtgagcagggcggaaagggtgacgatccatcagctcaagaagcttgccagcaggaccatcgttgggaacggggtacggcgtcggacgcatgcagtagaacgagtatctgccatccgcatccgtcttgaacttgccgcgcaggttgaactcaacctgctcggggtcctgctgctcgtacagcccgttggtggaagcctgccacacctcgaccgtcgcaccgaccagaggctgcttggtctggaagtctacgacgcgaccgtgcatgaacgccatctcggcatcagcaggttttgtcttgacgatattctcgccgttctcgcggtatggggtatcggcgcggaagaacggacccaggatggccgtggcggtgggtgcatcctgggcttcctcggcgagagtgaaggtgatttcgtcgacgagactgttgtgcaacgaatacatgttagctggtgactttgtttcactctcgaacaacacttcggcttacgattccagtcccagtacatcgcacaccagctgtccctcgttccgcttgtcgtcgctcatctgtcctgcccaattgagcatctgcacgccggccatccactcgtcgacggtgagctcctcctcacgcgcaaagtcgtgcatgtgcctgattagaccggccatgagcttccgcatgcgcggagtggtcttaggacccatcgcgttgatgacattgtccgtgaagttgggatcgaagcggtgcgtcgccattgttgcgcgtaaatgaatatgttttgctatgcgtatgagtgcggcttcaaatacagaaagcaggagagagcggtttaacaaggggagagtatgcgattatcgaaaccccttgagaccgttatataccacacatggtgatccgacgggattcccagtccgtggacctgaccaaatacatgacgcctattcgaggacaaccccgcaaccccacgccaatggcatgattggggtatggagtcgtcggatgtgcataaaagtacggtgtcagtcggtcagggacttcggaagaggttgcacttccgatttccccgcagtcgggtagctgcagagcttggcagggagcttggcgataaattatttagagggttggattttgatgggatgaaatgccaaagattcaatatgaatatcgtacaaatagaatgagttgtagggtgttttatatatcagaaagctacaagcagcttccgaaatcccaacgcaatacgatgtatatataagtgtcatggtatgttacacagctttagccgtcggaattaccgttatagtaagataacacgctgttagaccccagggcctttcggctgggtgaaacctcagccctataatcgaagtggggacaacttgagatggaaaggattccatactgtaatggtagatcattaggaggattatttgtattccccgtggtcgtctgtgtcgagctgaacaagtatatgatactccctacagttggggtggcatatctccatatcacactcatcgccgggccttgggattcctcttcgtaagagtctccggaagttcctgtagagcgcccccgttcgcccagagcttacccaacccgaccttacgctccactaccacatcgaaaaagtccagcgagacgaacttgtccgcctcgcccttttctgcctgcccactcgccacgagaggtatgccctcactaagaatgacgccattctcactgcgccataacggtacccctgcttgaagtgctttgcgcacatcgatataaatcaaaacctgtgcatctcgccgcataccggagatgacgcgcgagtcatcaagcttcggtttaccccccgcagcatcagcgtgaatagcaagcactgattctaaggaaggtccagtagcgaagtgaatgtggttccggcccatacagcgtagtccgccggattgtagaatcaaaggccaagtcgcgtggaacgtgccgtggacgacggtatcgggtagtttcgattcatcggacaaagaaagcggctcgaggaaagaggcagcatctacggccttgatgctgtggccttgggtcgcgcgaattaaaaaattcgacgggtcggtatcttcgacggctaatgcttggtcggtggctgtttgttgcgcttcgctcagtgcagactccaggacggatgttgtagcctggtcttcgcctaggatagcgccggcttcgtgctctgcatcgggggttgtcactagtgttgttgatgcttgggttctggatttggtggctcgcgcggatggaatgtgaagaagggcgaagcgctttttatcggacgagctcacggcatatagaatctcggggaatgtgacttttagcgatttgagcttcctccaattcaactggagtcagatatagtcagtatatcgtaggtcattcaaacaacaaagctgcataccacgtctggcacgctcgcataaccttgtgcgttcattttcagcccctccttctcagcggcatgtcgcagaagcaagctcaatgctttggagacttgaacatcgcgactttggccttgaccatggccacggccccgcttatctttgttgtctttgggatgagccatatttatcgagagattcaaggagttgttaagaataatattgtagtggggcactccaaatgttataagatgcggctctacaagacctcgtgtacctgattatctttgtaaatagtatctttcttctcattaaaataactttcaaggttaaaaacgataattagcggctggaaaaaagcccaaggtgttttggcgagatgtttaagtcagtcgccctctacacagttatttaggcggacttctgatgtcgaaatgacgcacatctattatctacatatcaggctaaatcctctttaatcattcttcttgtcaattgggtatagaatatcgcggaaacacaagctcatgacttagaacggccatgaaaatcatcaccgatcacagatgcagttacactctgctacgggacagatcttgtgtcgtttgaaccagtcattggcatgacttgcatggaacccatggttacaatggatgcaaaacaccacaaaccgccgcataacttcagtctcagtgggctcgcgagaacccgcctcggcatctgctgcgctactggcgcgtgacattggatctggcgaacccagccacaaagtgcagatgccgcaacgcggcatatgtcgaccacaccgcggacacacagtcccagacatgactgtaggtgctagagggttcccggcggtgggatgcacagtttcagcacccttggtagtggagacctgggaggaagcgtcgtgctgggtgagcggactcgtgcagtagttacaggtgagactgacttgctgcggcggtggtggcatgagtttgcgaccgtctgcagtcacggcgaaacgacgagagccaacgtcgaatcgggcacgctcgagttggagtttccaggagttcatttgccgccggtaggtctcacgccaggcctcaaactggacaatgtgtttttggttgctaacaagccgcggcacggtatggctcattgctagcacgggagtttggacatcattgaactttccaatataagattggaaaagacccatggccaaatgacccaagccagtgaggacgattccttcaatatcgccttgacgaattgcttggcttgtagcatccttcagatactcagttaattcgtcatctggaagccagcgtagcgcgacctctacgcgatacttcagaggtagtgtggtttccttgataactgcattccagtcgcctttgctcacaagggctaggatcgcccgggcgtatggatccgtgagctccttcgcgatttccgcacaagtatcctcccagtctgtgtcagtgtcccccttggaggcacccgcaatcgccatggctagcaatttatgtgcttgagtggggttgttgcttcgaagcccgaggtaggctagcttgggctcatcttggaagacagccaacgcagcggctttagtatgctggttttcgccagataaagctttcactgactcctctagttcacggtaggattgcgttgcaccacagatacgaaggcagagttggcgatggtcggggtaagccgtgtcacaaccttttgtctcaggaagattcaactgagttaccaagattgccactgtatccgcaaatgttttagcaccatccttcttattactaatacggcgttgttcgagaccattgcctgtgctctcgtcagttttgagaaagacttcaaacttaagcgaagacaaacctaggtcattattccaaacactgctcacacctagataattcaggtccaagccattgacgaccattgacgtcccggaagactcttttcgagcacctaggaaatgtattagatgtttgtttgtgtccccacggaaaaatgaaaaactcacgttcaatccagtcccataagtcttgtagagcttggtcatcagatgccacctttcggttttgatcctcatcaaacaaataaccctctttgcaccggaactggttgattgtgcatagagtgagcgcttcttcggcagtaagagggacccccattaccccgatagccatggcgcgttccctattctcgtggcttgggacaggctcgaaatcaagattctttggcacaaacagttcatcatttgcattttcctcctgctcttgcgaggctgagtagactcgtgatctgatttcttcgatcaggccggatatgggcgcaatgtgttcagaaagtgggtgaatcgatcgcacatctgagtcattcgatgagatcccataggccaatacactccgtgaagatagatcaattggtgcgcacgggggccgcgcggtgatgatctgaggttgtccattgccgtcgagtgcgatagaacttggttgaggggacaagctaatattcagggaatcgaatgaaacaatccggtccttttctctgtagccgcgagtcgggttatcaaagggtatgcatacgtcccgtacgtgcttggtgtatacggattctggataatttctggaagatccctgaccaagagtctcgtctatcgaagagcgatactcttccggcaggtagtctttggaaatgtcgtaattcttgaaatgaccgctgctggacagcgcagcgagactgcctcggttcgtccgcgaaaagcgcaagctccagatggaggatttcggatggaaaacattcttgagttccaaagcaggtgtcgtttgacccgagtctgtggcactggcagaagaaccaattgctggggatgttagtcgggttccaacgcggcggtcccatacgcagatggtgctttcatttgttggaatgcaagacgcaatgtagttctcatcaagccagtcaatagccagattatgtacacatcgagtggggaattgcaatgatggattgccgggtccctctgttacgaaatcagctccaccttcgtgaatgtgaaaccaggaaagacgaacctcttagatcatagatccgaacaaactggcctttgaccccagttacgattgtatcaggctggtcccggaaaaacttgatactggtaataggctctgagctggcgagcttccgtaaaggctcagtaaatcctttacttccgccagcaggactgagtcgttgattcacgtcccaaatgttcaagcaaaagtcgttccgaacgcgatcgaggcccgatgccacaagaccatgtgtactaaacgccacagcattgcagtaccgttggttgcggactggaaatgaaagagattccttggcatccccatcgaggcgtaggatagtagcctccccagacgactggcccacggcgatcaggttctcatttgaagtagaccagtcgaatgcgcgaaaaccgggtacattggtcagagtggagagcacttcatggcgtatatactttccgtcaaacccattcaccctacacagacgaaatgatttccccgtgacgtcgacggacaggaagcgttgttccgtggccgacgaggtcggggaccagcgaatggcagactccatgctggtccttttagcaagcttggttcagatataacctcagtagcatgggtatgtgcaaattgccaggtacaaaaattcaagcgaccaattggagtaaatcaaatcaatgcgacgagagagggccgttggtgatggtgatcaacggagacgctcattggttggcgccaatctggggggcgggccgataaatccgccgatatctttttttcttatcgtttttgctgtagcttcaacctctttttttcctttccttttctgtcagaccaacaaacatgtctacagacactcgagacccccgtgatcgggcagctcccccaaagaggaagtcccgggatgggtcagaggatgttcccccggcccgcaaaaaggtgcaccgcaaggccgacaaagcagatggccaagtccaattcgaggaatacagcagcaaaggcgatgcatcgaagcccaaagtgacccggaaatacaaggacaaatttgctcccaaacctgaaaaggaatacccgtcgatcaacgatctgaaaaagcgaattcgtgacgtgaagcgactactcaacaaaattgatttgtctgccgatgctcgcatcttgcaggaacgtgccctcgctggatatgagcaagatcttgcggatgaaactacacgcagagaacggtcatcattgatcaagaaatatcactttgtccgattccttggtatgtggccgatatgtctgaatgatcttgtgattcccgctaacgtactgtgttcttatggaatagaccgcaaaactgctaccaaggaactcggccgattgactcgccgcgagaaggaagagggtctggattcgaaacaaaaagctcgtcttgcagcaaagatccaccaatgccgtgtgaacctcaactacacgatctactatcctctcacagagaaatatatttcaatctaccccaatggaaaaccagacgcaacggacccaaagacagaattgcaaacgcaagaaaccaaatcggacgatgccaagcccccgttgtggtccgttgttgagaagtgtatggaagaaaagacactggaccttcttcgtgaaggaaagttgcgcatcaacgccaatggagagaagattcaagctccgtcgtctggcacagctacagctacggatacccacaaggagaagagcaagaagaaagatcaacagaaagataccgatgctacccaaaaggacaagcatgtttccaaagacaagaatagcagcaagaaggagaagcctgtacacaacgagcgggctgctaagaaacacgaggcaccacagcaagccaatgcagaggatgaggatgatagcgatggtggcttctttgagtaaccgattcataagtttgatcattggtttgtgtcttatttgtcttgatatccacactagcattctatacattctattgcaatataaccaagcgacctgttcaaaaagttcaccgtgtaataaccgggttctccacctgcatacatcagtgcctgtgatgtatgcccatagacgtatagttgttagccggaacacgaataaccgattttactttataaggaataccatctgttgcatgtacgaacggccgtccaaacgttgtaatagctattttgaactcacaccagtctacttagcgatccgccacccagtgcgtattgtagagttatagttcgtaacgcgattaacgcaataagtatgtataagttggcttattcgtttactttcaacctttcaccttcccatgttcctaatcaatcctcatttttgcaattagctctgctatcccaaccttcgttgcattgagctagcttcagagtcaatgcttcaagtagcttagggctacataaccacatcaacctctcacgagttcacaggctgcgaccactggatcaatacctgtgacctcattactgagatctgaattcgcgtctatctcgcatatctggcttttctacacatctactttgcgttgttgtgtctctcaattcgactttcatacttgtcgccatctcattgtgacctcgctgtccactacaggtaagatatcttgcaagattaccccctttatacttcgatctatatccttatgctctattcatgttcaccttacgatgtatcttgctgcatatggcgacttccatattcattgacctcctggctaacaaagcgcagatcttccaatccattctgaattctttcaagtcaagtcaagatgcctccagagaaagaggccagaatggcctgcgacatgccaggtagagcagacttcctcaaacaacaggaaatccttcgggatcattgcgcaagcgccctcaaggagcacctcgaagacaatcccgatgttatttggacacccgaagatggcgaaggacagccccccaccacgaaggaagaagaaactcagctcaaactgatcgtgaacatcgagttcgacccaaaaaccgacaagccaatcttgcctccgatcaacaaccgactatcagatgagttggtctatcttgtgagcaaattcacgaacgccctcgaactgtcacgtcgatacccatacgacttcgacaaaatgggccatatcaaacccgaacgtgtgtcttcaggaccttcccctatcatctgggctcacggcctccctttcttcccaatctacaaagggtattacatcctctgtggacgcgaacacgctaaatgcattggctggttgctccatgagcgaaccagggagatcatgcaagccaaccccagctggtctgttggggcggtcatcgcacctgaaactgccgtgagtgctcagcatactatcactcgtcagatgacacagcacaagccttatggcccggagagagagtcgcgttacaagggcaaagcctcggctcgcgatttcgtggctgcggagcaccatctctgcgctgttctgccggacctgatcacccgtgagattgaggtcggcccgttgtggcaagcctggggttacaacgttcgttgtggacctgtgatgcgtggcgtgagaacaattatcgtcccgaaggagtttttcgatagccatggtctcgaagatatcgactatgaacactttgctagaccgtacgggaaccacctgttagacgaggatgaagagaccgatgatgaaatgaacgcaggtggtggcaatcatcctggagatctcgctggacagagtgatgaagttgctagcagtaggaaccggtctgcttcccaaatggacttcggcatggacggcgaaagctcgatggatctttcaaagcaggccacagatgggatccacaaagaggtctcggaagaggacccagaagagttcacagaagaggctatggaagtccgcatgaaacaagtcaccggggaaatactgaaagacctcgaatccacgccctcgggccttgaggaggaacaacatgctgtttctagcagaattatgaacactgagctcagcttgggtatctgggattcaattaaggagttcattgatgagcgcggccacgatcagaccagcactgctgctctcgcttttacggatgctgtgattcaaatcgctgcacgtgctcaccaaacccaggtgcaactgatgagcaaacaacctgaaaccaagcaggcagtgactgatgccaccactaaaaatactctccctattgacctgccaaatgcggagcaaagcgcatgcgaacagcccggtactcagcggttggatcacggtgcagctcgggacttgtctgaagttgacgacgagactggtctcgactagagccaagtaccagcggaggctgtgcaggatgagggaaatttaaaactaaaaaagggaaattgaggtcggagatgggatcagaaatgagattgactctatctttaagagagatagtatcttccaagtgttgccttcttttctagggcttcatggtattgggggattgtgcctttctctttttgatgtacttctttgctttttctttctttccagtgacacgcagttcgtcactgtaattgcaattatttctacattacattattcttaatgccggcatgtacgccgcactacttgctttctttgaaaagtcaaagtacctgtctatcacccgtaatatcatctcaggccaaatagttcagagtctacaaaaagcccactatcagcatcgcgtagatctatggctacaggataatttggaagtgacgtgtcataaaagcagccaggaaggcggcataaatgtcaaattgaaaagctcaggaaagacagactaaaggaaaaaagaaaccaaaaaccaaaaacaccaatcatctcgccggtaacccctctagatacgtatgctggagctgaaatctcgatatggcaaaagatgtcaacgtataaaaagctcatataacatgcaggaaagaaagtccgaagttggcgccagagctaaaagcagggaggtgaatgtggtaagatgtgaggatagatggtaaacagatatgaaaagagagagataaatggccaaaaaacaagtcaaacgcaaaagaaagtgtgttgcgttgggaaagatgttgtcccgaaaaagaaaatcatatcgtgcgtaattcatagtaacttgacaatgaccattggatatgatcttcagtttcaaatggggtgtcgtccgggaaatactagcgatcctgcgctagcagagtcgagcagcgtcttgagtctagctcgaaaaacaggtgttcccaaaacacacatcaagaggcgtttacctcacatgacaatacagctaccgccactctgggctcgtctgcgtctcccgccaggagcagagacagagcctacgccggaagcatcgttctcgtcttcgtcttcgttgtacagacgctcggcttcacgggcacggcgtcggcgtcggcgagcaccagcaccagtggcgccggcctcctcggtggctaccatgtattcggcccatttccggtccagccgggatgcagcggtgagatcgccgcgcagaacacgtttcgtgtgttcatcaacggtcatctgccagccgtagaaacatttcagctggatgatttcgttgggataggttggtgctggcgagggcgagggcgaggaggctggagtgacgaaggtacttgtcgatggggaggaggcgtctgatgtttgtgtcaccgtcaccactgttgcaacggctttgcgggaggcacgcgggatgtatgcgttgctggagaggacttccctgacccctgcccaggtgacattggcgcagtcgaatatcataaggcgcatcccgatttgggggaggtcgtcgctgtatccgcggcggcggacgcggaagctggcttccatcagggtcagatctgagactctggtgttgtccatttcgacggatcggagtctcgggcagttcttcattacgcgaagcattcccgtgtcgctgagactctcgcagtagctgatgttcaagtgttccaactcttgggcacatggagattcagccagctgcaccagggtggcgtttgtcaaattctccaaatcctccagttccaaatgcgacagttttggcgtcgtgcgaatgacatcaatgacggattcatcggtcagctcggagcactgagaaacctgcaggccttccaaatctggaacgttatgggccaggcttttaaatccatcgtcggtcacttcagggcaattgtggaggtccaaatgacggagttttcgaggtggaacgatagggcgatcggttagaatatccatctctgggttctcgccatggatcagcatcttgaggctttgatcggttaggtcggtacgactcatgatcaagcgatccaaagtattgcgctcgaataaagccaaagtgaatttctcatccttgaacccgcgaatttcgctggcccgaagatccctcaaccgccaacaggactggacaatccgaataagaccggaggtatcaatatttctacaccaggaaacattcaacgttgcaagctgcggacaagaccgtgcaatgagcttcatggccgagtttgtaacattcgacagacccgagagattaatatattccaagcggggattacgaagaaggaaagtgtagatggattccttttcgatgcgacaaccctcaagcgagagattgacaacattccggcatagatccgaaatacgatctccgtccgaggaccatttctcacgcatctgaacgcagcctctgagattgaggtctcgaacaaacggaccaccgcaggtgataagcttaagcaaaacatcacccgggatcttagagtagtactcggtcgtatcaaccttggaccataattgtccgttgtagcacatctcattccacgccttggatacaggggcacagcatacaatttcctgcggggtgaggtattggaagatcttcaccttaagctcctgtggcatatcgccccaaaagtcaaaagatctggccggctgggactctggaaggatgacctcagtctccaccttcacatccaccggcgtcgcgctgcgtggtgacccacgcgatgctggcctcatatcggagggcataggcacggtgcgaggtacagggaaaccagggccatcggtctccatcaaacggatgcgagcgtttgcgccctgggactcaccgggagaaccagaacagccgggagtagcagatcggggattgaggccgccatagagctgggaggaacttccattgcctagacagggcgagtaggaggtcgacgatagcgaaacacaagagagggaagccttattgtctcggcggtagccagtggttgacgaggagcgtccgcgtctggtcagcgtcgggctggacgacatgcgttggagactctgcagtaacttctgacgacccttgagtttcggaggctgctctaatgggatctggccggtcgaattggtcggaatgttcggagagatactccccggcgagggtagggccccgtcggatacttgggaggccattttgccaacttgatcccggctgtagcacctgtgatctggcccacgaatatcttgtcgcgtcttccggggggcgtcggcacggtacggaggatcacacgagcgaggatagtaacggagggacggtggaaacgatagagcgacgggcgcgcagtcaccgggctcttaaatgggcatagtgttcgatctcaaggatgaccggtcttttggatattagcgatctgaaggtcagagagacatagagaggaagtgatcagaatgtcggtggggaaaaatcacattgaccgttattgtttgttgtagggccacggcgaaggaaccgtggaacaggtttcggcaaagataccgtacagaaaaccgagagaaccgaaagagccgagtagaagatacaaagggcgggggaagttgcgaaaggaggagagaaagagaggtgcaaagaggaacaagaaatggcggaatgcagagcggagggaatgcgatacctctgctaaacctggcactggccttttctcacatagcccgacgttgtactgcgcaagtacctcgcccctctacgttatctgcttatcgcttctcgtctgttagtactaggcaccggtatatacaggcatgtgcttgaaccatttcttaatattctatatcccggtgactttggagtatatcctagagtatatcctactttcatttctacgctacagaatgtcttgacacagatcgtctaatgtgaaaccaagtgcacacctcggctgacgacgccttgaacagaagatacaccgaattcgacgccacccaagcgggaatccactcgaggcaccgatccagggacaccccgaaggcgaagtcgttcctgaatcctgcgaggcaacccgttaaattcattttcgcctctttcggactattttcgctggtggggcgcgtgcggggaagacgactaacccgtggtacgatggcagggaacccatggaatcaaacatgccatatgtatgtcttccgaggttcgacttcgtattttacggtaagtttcctgtttgtctcgtttgagggttttgttttggaagtcaaggcaccaagtgtcagtgtagcaacatattcccgaggtccttagctcaaattgctggtatcaactccttaaggttgcatatgaagtggagaggtgatagtcatagcctaggctatcgtagactatttgccagaaagagacgtacgctaaatgttccccgcaatctaatcaaagccgtactccgtacgttgtatgtaagtctgccctcttaggtctctaggtcacataaagagatatgcaaaaggtatcgcaaattcaaatgccatgaaaagggggtgaaaaaagctcgataaaaataaaccccgataaaagaagtaagacaaatcatgcgttgatgttcatcatcatcatcaacgtggtcctagggaagttagaagaacagacactcgctccacaccggccccgaaatgatacccagtttcccggaaaatttggcatccatcatcaaaacgtaactttgtggggtatcgcgttatttgtgtttttttgtcaataagtaaaaggcggagggagaagggagagtagagtcgtatgagaagggattcaagtcaccaccatccaaggatgttcaagcacttcggtaatggtgagtcggttgtcaacgtcacgatcgagcatcgtgcggatgaggtcaatgcagtcttctgagaaaggaaggaaaggaattcggagggggtggtcaaggatctcatcgacgttgtagaacgggttctctttgtagacgatggtgtaaaggagaatccctagagcccagatgtcctgttccttgcctcgatacgaccggccctgtaaggcctcgggcgcggcataatctaacaaacatagtcagcactgaatcctccccggtcaaagagaaggaaacttaccaatggttcccacaaagacatcaaatggcccgtttttgatatacgccgcactcccaaagtcgatcaacttgatccgtccctctccatcgagaatcacattctcatccttgatgtcacgatgtaccaccagggctttggtgtggagatgattaatggcgctcgcaacctgtcggaagatgttctggcactccagctcgtccatgttggccttgagctcgatataatcgaacagatccattcccggaagcccgtgaggagtcatttcaatgtaataattgatatcgtcctcgaagaagccttccatctccacaatgttagggtgcctgagcccatcccgccgtaggaagtccagaacatggatctccaatggcacagtcccgagtcgccgatcccgagtccacgtatccaccaggatccgcttcttcgtgacgaatttcaacaccatcttcttgctaggctgcttctttaaacgggccagtttgacttggccgtaggctccttgtcccatctcttcgagaatcacgtagtcgttgatcgttcgtttcgccggagggtcgttcttcgcattggcagccgagaccggaggaacgggctgcgggggacgggtggtcagaggctcagaggcagcctcactgagttgttgactaagtgctgacgtcggagcttcaatctccacagaaatcttggggttttccgtctgggcagcaacaccggcgtctaaagggcgatctgaatcagggtcatgtgtgggtgaggtaggcttagaacttgggacagatgatggcgacaggccagcagcgggtccagcagcgtggagctgtctcgagtaggttatccacaaagcatagaccaactctgtgactgcaacggtatcatcactctcatcagagtcactggtgcgatcactgcttttgctgcttttgctgcttttctctgtcttgtcctttgagaagcaggtgccactctgaaccacgcgcagttgaatgtccacgacaatggtcgagccatcccgatgcttggcaagcaagccacttggctctgtaaacacagaggcggcatttgcttttccgtcgcggagaatagaaagtgtccgtgcacgccggaagctgtgttccggtatgacaataccatcaactagtggtacgttgtcctcctcggtcaaaacgtctagcatctcatcgaaatcgggtacaagctgagtgatgtgaagtccttccggtctctcttgaccgaagagaaccgaagagaacacagagttggagctgatcacgttcaatgacgaggacgagagcaccatcatgcctgcgacatgaggaaagctggagacttgcatagtgtaatctccttctcccttgccgaccgcgacgggaatacaaacgccagccgcagtgcgggcggcaaagtgcctcagctccacgattttagccaatcccttctcgagggatgtctcaagagattccgatggcaaacaaggtaaaaggtcggtgatcgactggcctttttgaacgacagatgggccccagattttttcgacttcacctttggcactcacgactttccatgaatcatcacactcgatgaaggcaatattctctgttatttcttccaggacccagatcaggccaccacgcttttccataacccagacgctagcggatccccgtgacccattgcgcttctgaatcgggaccacatcaccgcacagcaagacaccgcgtgacttattggccgggtggttgttgtttcgggcgtttcttgtgctggagccatatccgtcatcagtctgcgctctccgggactgttctcgtgaagatggtttgctgaggagttgtgctgtcactccgttcccaagacctcggtacttgggattgacggcggaaatgttagctctttcgggctgaagtggcatgcgggcagcgacgtcagtgctaggatctcgaagtttagccttgagccattcctggtgttctttctgtacaacctccaggatgctgagatggcgaacttcggactgaagaacaccaaagatgagacacgacaaatcattagcggccagaatggtccatggttccttggcttcggtcctaaacacggcctgggaagccggggtccatttgctgctatgggcgtggagggcggggatctgaaatcctaatccagcagacgagggattgagcgaggcgaaaggatccgcggaagaggtgtatggttgtgctagagtttccatcagcttgctcctgatagagacagagcataggtccgtgtatgtacgttttaagcttacgcgcctggatgtaggtgcagagaccaggtccctcctttggttggagatacgatcgctgggcaccgggctcaacaattgggagctgtcagaaggatgtgatcccaaaggaatggaatcctgggcaccctctcgggtgctgaccggggaggaattgccgtctgcgaaggccttctcgaagatattgtcgctattaatctctgcgggtcctgtgctgggtccacggccatggagttggttatcctgggtttcgagaatattcgctcgggccaaaaggtccatcataccttgcatctccgtgtccccactggcgtttgcttgtgcgctggcgatcgcggcattggtggcggcccatcccatccggtcgcgcatgaaatcaacagaccttttgagaatgttctgacggctgtggagaaactcctcggactgctgggcaaaggaaaaggagtgtagcgactccagtggaaaccggtgtaggtccgctagatccgtgaaacttcggctcgacaaaagattggtgtgagctcgagaagatgagcgagaacggggagagggagaggggcgctggccagtcataggtgctagtgatagcgacgaggaagacatgtttggaagggtcagtactctcgagggttgattttggcgtatacgatccagtccagatgggccaattccatggtcgctgtcgaataacggggatctgttggagtatagaaggtgtcaacgttatgttaaggagtcgaaagaatataatcggctgacctggagagaggttcgtatcccgaagaaacactgcccgccgagctcctgagttggtctgtctgtaaagaaaggttgtatccggactcggattcgggcgactcagagagaggtcctaacggcgacgaaagaggactcggctcgcctaagtcttgatcagcgtgattcactagcttatgatcaagtcaatcggcgcgtctcggagtttccattccatgggcctttcaggaaacgtgacggtttggaatgatcagacgcttcatctccacggtcagatgcatatctgagcatgtgccagcgggtgaccgtgatcggctggggaaaaagcgattcgcgccctttcctttccggtgctcgatgagtcgtaagcccaatccgagtaccacggtaacccgttcttctcgccctcacctccactagttccccaaggcccatgaaatgagaaacaaagactaaacgatcaacatgaagaaaaagcatgtgcgcgtcactgaccatcagggttgtaagccgaccccatccccgaggtctctcttctctctcttctgtctctctttttgtagtttttggttatgctcggctttaaattcagatgatcagatgggagacaaagagaaataggctcaatggaggcgagcaatcgagaatgtatcgagggtatgcgacatgtatccggtcattcgcaactgtgacggggattgggcgggcagctgcctcgtagggtctcaggcggcatatgtggcgtcgcggctgggcacgcagaaaggtaggaacaagcagaggaggtcgaggtgaatctttcaagggggaggaaaaagaaaaagagcagcggggaagagagggtggggagaggaaaatgccagatgcgagaaaaagggaaatgggccccctccgtgatgtaataactcatttttcctatgttttctatgtttctatgttgctacagccatttctccttcgaaataaaattatatagaagacaaaatgaacattttatcttgcattgacggtttgtcttatccagatcggctgatcgacatttctatcccatgtggcggaggaatttgagaatcagcccttgagatctatacaagatagaaatcatggctgatatatcttaaatagaaccaagtacaaagctaccaccctaatacgtgagtccacttccctcgctccgccaatgagatatgccatggataagttatttcccatcgaaaagactcgagatgatgcaaagtggctttcttaatagatccgagcgtcttaatgtgggactttgacccctttggttactagctttctatgaagttgaaagactgtctcacatggtagatcgaggcagagatgggattgaaaaaactagattctgccaaataaatgtctccgttaatggcgtggtctgtaacccattttctgtgcgggaattgagtgataatgcagcctggcaggagataagaagtgggactagccttgacccatatgtccacgggtacttccagtgcatacgcaagcagtgaccttggcctaatccggagatatcatggtgggccagtccctgacagagggtcccgagagccccgaaggctgtacagcgccaactcactatgctcggagtcggaccccagattgtcatctccgctcattccgaacaaggcattgggtttgggtttgcctcgagtttggtctagatgccgcgtctgctcaggtggcggcgatgtcgagctaacaaacccggacaggttccgaccaccgcccagcatccacgagaatcccgaatcggtcatagaggttcgcacagttgatcgcgagggtattgtccgcgcactctccttcttcctgtgtgtccgacttgctgtgtctaggatagaattggttccactctcggccttcggcccggtcatatccgctttgacagaatttattgttggggattgaccctcgttggccacaattttgccttcggctttacccgttgtggatgtgattgtctcttgtaactcggttggttggctcaattcaccgtctacacgggggtcaagagggggatctactggtatcgaagagtctccaaggcagatctggacactctcaactttgaccagagcctgcttcactgcgttggtcgtatcagaatccaggtccttgatatttgccagctgcgatccaaggtcatccagcgcctcgcgcagaatcgttgccaacgcctggttccttttctcaaatagattgatcttcgtttccagtctgcccaaggccgccgtagccgccatatccgaggctgatgtcgcggaaacaggcctcgaactaggacgcatattggcttcaaaatgcattgtatgcatatttttcctggcttctgtcacggcgcctcggacagctttggctacgccccaggtctctgtccgacgttggattccctgggagacgtcttggaaaagagattcgagacttttgggactgtttcgggctggtgatccagcaggtgggctgctttcactgcgtttcttaaagtcttcccaaaggaaggccttcctcgtgggccgcgtactaggctggttgggaaatttggaatcgggcggtctacctgaatatttcgatatgatgaaactgcctcgatcggcggtagggttctgttccaaatataatgcatcctgcacaaaagtctgagctgtgtgtggttggggcgaagggtagcgaagcaataatgtcaaggcagttgtatagtcggccgtaagcactaaatgatacatgtcagcgaaacaagatacgatgaggtattaaggtcgaccaacattgccaacgaattctaagtagcattgcaatgcacgtgaaatcgacaagatcagaccgtagtccatgagcaaacagtaaatcccacatcatcaggacatcatcaaatggaaattctcgcccaaacagaaggcgcatccagcggcttctcagtagttagtacagaagaaagtagataggtgactgaaagctgcttacgttaggaaaatttgcggtaatatgtccacagcttcaaggtgctcggcgagctcatgatctataatcgccaaagcttccttatggagataatgacaccgatcaacaatcggaatgacatccatctggccattggctgaccgtgtctcgccgtgctcatagtataaacgggccgtctgcattacagatagaaacaacgtaaatgaatcatgctccacgaattgtgcatcaagcatctccagcatcaaaccctcacttgtgtccttgttcgcatcaagtccttcggggtgtggcttcaccgagtctcgatctactgcccagagaataggggcgagtaattcgtgcattccttgcctataaccgacatctggattgagcttcgagtagacgaacagaatatcagtcaacttggctttcgtgtcgggctcttgaaaaaagaagttttcctgcaagcatcggtcgacatcttgtaggatctcggtacgcagcgtctcatcgtgtcggagtgtttgccaaggggactgattgttccaacaaaaaataattagatcggagagttcttcgagttgggcggagcacagcgagagggtaattatatacctgctcatcatccgccagaggatcaacagtcgactccaaatcgtctggatgttcgatgtatttcaagaaatgatctcgcagtgcacgataggcaccccgagattcgtccagcttaggcgcccattcagtcttctccaacccgtcgaagagtagaaatgcctgcacgaagaatgagcatatatctccacctcacgttgtcaaatctccagaaccttccagcaaactgatctcagtccgtcattgcacaggtttcctccttgctcggattgcaacgccgctcggaggtcggaagtcgtggtgttgtcggagaacaaaatgtcccatctctttctgtgagggtcagtaaaagtaaaaattgacagacagcgtgagagaaatacctggtctcctcaatggttctcattgctgaggatgagggagagaacaatagaaggtgagggggatgcgggcgatagtagaccgcccgtgccttatctcgcgctactgccctgactcggcccttgcgatgttccaccgctatactccggtttagttcggattgggaagtttgcatatctaaaatgatatagagtgcggctgacattggcatattcgatcctgtgtcgttctccctgcagaaacccgctgcatcgctgcacttttatgtcacctctcacagcttcatgacactagtgtacattcaagatgtccgctgatctactagcagagtttggtcaggcgcctgctccggacaataggccggaacagcagccatcgcaataccacaaaaactcatccttcgacgacgagaacatcgatttcttcgggtcatcgggaagtgtgcagcacaacaaacgtcccaatccgactcctggagcagccagtcaacttgcaactccagcagcttcgtggcagggacctggtcgtcaggaatttgacattcccttgaatccacatagtgatgtattattcgatgcagcatttgacacaccaacaagtgatgcagacgatgactggggcgaattcgaggtccctgattcagacacgctacatgcacaatccactcttgtacattcatcaacagctatatctccaaaaccagagcctcggcaagatggtccgcaagcttctaaaacaattgacttgctcgattcactctcattgcaagactttgcaccggctgtgaaacttcactcgaatattactaaaaagaagtatcctctcgaacctgataatagccaaaatcaggcgacatgggaggatgattcgtttggtgactggggtgatttcgccgatgtgcctgctagccaacctccccccaaggtcgccgagaagaaaacacgaccacctacaaaaccgcctgtcaaagccactaagccgcttgcatcaacctgggatgacgacaccttcgacgactgggatgatttttcagatggacctagtgtcaagcctgtgcctaaatccaaacccaccacccctagcccagctcctactagctctgtttctgggaccacagcccctgcagcaaccgtgcgtccaacaaacatcccaccaccatcaatccttctcgagttattcttggatgtgtttgagaatcttcagaaggatgctacactcgcaaaatcccaactgcgatcttcggccccactgtcatcctcatcttcaagcaccgtttcaacaacagccttaaatattcacaatgtacttcaatcggccgcccgcgtaattgcagggcgaagtctccggtggaaacgtgacacaattcttagtcaaagcatgcgaatcggtcctgcccgttccggcaaagccggtggtatgaaacttaacagcgtgaacaagcaagagaacatcaaagaggaacaagacgctgttgacgtgctgactacttggcgtgaacgggcggcgattttcaatgctattctacaagcggcgggccagcggccaatccctacgatcccagatcctagtgcgctcaaggttattacggcacgggcggaccagggcgcactaaaggcatctcatccatgtgcactctgttcgcttaagagagacgagcgggtgttacgggtggatgaacaaggtgttcaagatagcttcggagagtggtggacggagcattggggccacacagcatgcaggcaattttgggagacaaatcgaaatctgcttgggcagcgttgaaagctagatatgtatatagaagaaaaagttgtacatgaatgggtagaataaagggaaatgtcaaatgactcgaatcatttggatcatcgggagggaacccgacgacatccctatctcttccctcctttcaccctctcatacttccctgctccctcgagataagattttgtatccacatccctgcgaaaccgtctgattcgtctttcgccttctgataacaacacattcccctcacggccctcatgggcctcacgggcccccgcattccggccacgctgattcctaacatatcacaatacagatggcgggtaatggaagactcgcaaaacgatcgtcgaatgcgtgagtggcattttaaattaatagaaatgcataccgctgactatttagttgtgtgcgatgccggagacagaagatcaaatgttccggggcgcagccctgcgaaaagtgtagcaggcgaaagctcacttgcgtctttgataaccatgaccagaaaatcctggtaacaagagggcaagttaaatggagtgttaagaagaatcgatatctcacatttatcgcagttacattctagacctgcagcagaagattgcgcgtatagagcagagccagaagggccaagtgagccctttcagcccgaatttcgatactcagacatttggtttgtcttactttctatttaatctatttaaatggatgcctactaacctgttgcagatcccaaagatcgcgaagatgtacctcctttgcagaggactagtcctccagaggatcttgatgaagcccaagacctggaggatctggactctgggctagctaaccctttgtcgtccggtcctcctgcatttatgtctgcagcaaatggtcgtacatgtaggttatgccggtttcttggaatgcgcgactctaacatccacagtctatcttggaacatcatccaactggtcgttcacccggcgagtcctcagcttggcacatcagcacctctatcagaatgtattacctacagaaactctgatatttgatgaaacgacctatgagctgggatgggatgggttacgaacaagcccgggcccagatgttccagttgttccgactcgcgatcacaccatgtatctgatcaacgccgttcaatttcggtgcgggcaattgtatcacctttttgaggaaggagagttcatgagttctctgcatcagtactacttgggagatgggcaatctatgacaaatagcttgtggtacatccattttctcctcatcctggcctttgggaaaggatttgttcaacccaaggctcaaggtagaaaaccaccaggggtgtgctatttcgtcaaagctttgcagcttctgcctgatccgactgctctgtaccgtgatcctatgctgggaacggaaatcctatgctgcatcgccttatactaccagtgtgttgactttcgaacttcggcacataactacgtaaggtttctaaaagaaacgtctcatttgaaaaacccagctgaccaatgctttagatcggacaagccatgcggatggctatggcacaaggaatgcacactagtatgccagtcgaggatttaggacatgacatggttcaaagatccagcaaaatctggtggactatttacattctggacagagaaatgacatcgttaatgggtctgcctcagtcgatcaatgaccgatatgtgcaaacccagctccccacctttgcagacccatcagagacaatgtcattgggcatgcacatcaaattgtccaagatcattgccgaggtgaacagcagtaagagttcctgagcttccatcgttgattatcacctctaacaaaaccaacagcaatatatgttatcaatgggcgctttaatcggacttttctacttagcacaaaaacagcattggcgaacatcgcagggcttgccgatgagcttcgcgagtcatttccgctacacttggacccaggcagcggggtttctcgaatatcagcatacttacatcttcaataccaccaggtatgtgtcttatcatctgcgggaagagctgcatccgctaggttctcacatcatatgcagtgtattatcctggccacccgacctctcctattctgctttcttaagatccgcttcgagtccccagaaagctgtttggaatccctcaatgcatcccaaaatgtccgaaacctgatgcaaatgtgtcttgaatccgcccagaacatcatcagcattctctccagtttgcagagtcaaggcctcttaggtacaacaaactttcgctacagatacgcccttgtgactaacacccaaatcctagaaaccttcctcccctttgatctagaatcagtcttcgtatccactgtcatcctcctcatgggaccagcgatcgacccgcgagtattagagagtcaccccaactggctagagaaagcctatgccatcttcggcgaaatgatcagagacggaaaccaagttgctaaatttcggcgatccgagctccagcagctacacgagacattactaggctgtatctctagtgatcggcctcgacacttagcagtccctgacttcttccagcaggctgagatcatctctgacccagcttctccttcttcaacgccgattcctggggctatggctcaatctattcgatataatgatgcgcttctgaggccggatcctggtttggatgtggagtgtgattttactacgatgctgacttcggctgaggttatggctgttgcgaactcgattgagagttatgatactgagtgggtgtctaatgcgatgatagaacatagtatatggtaaattgaatgtctgatgaatgacgaattgcaaatataaattccgtgatatttttatctgttccgaaagaaaaagcaagacggtctatgccttgaatggttaactatacgttgaactcgccgacattaaatattcaaatcatctaaagcttggacagtatcgtaggccggatctcagagaactccttcgactctcccaggcgccagctcacatcaccaccccaatcccccttgccctcattgggatcagtatgcttccatttccaccgtgcttcatgctgctgaccagcctgcaggaaatccgaaacccacgatccaaagatagggaacatcttgaacccatgcccagaatcaccagacaacacaacaaccgacgacgacgtctccggaacaaaatcaataataaagtccgagtcatcagtatctgcaaaccagcaaagcgacttcttaaccagcgggcgattcgcaagcgccggaagagtctgcgccagcaacttcctcatcttcctctcgtcatgctccggcacaaacgcactttcctccaaagtcccaggcgcatgagaaactccagtctcaggatccgtattgatatatcctccacccatgggacagatcttcaacaagtttgtctgaggatcgggctcgaagaggaaacccaagtcacgagcataggtgacaggaataccacgcagcgcagaagtctcttcatcggtaagatggacatgcgccacagaccacgatttggccacgaccttcttcccaatctccgggacaagacgactcaccgcaccgccagctgcgacaatcaccaacgaagacgggtggaacttcccatccttcgttcggatcccggaactcttcttgccttgcagcgagctgacatagacgatttcatcgactgcgccgcgctctccgaggtagaagcgtacgccggctgcctgcatagcgcggtagacacctgccagtgcgttcccggagtgtgcatacccgtcgaagcggttcaggtatccattccacccagtcaatgggccgtcgagctgccagcaggcttgacgaatgtcgtcttcgccctttatgggcacgacatgtgatttgagttgatcgttcccttctgcggaagcgcggaatctattgagggtgtcgatagccttttggggtgcttcgccagacacgcagtggaggaatccagtctggtggaaatgaggtgcgaaaagaggagttttccatgcggcgatggctttctagttaatagataaaatgagacatcggtcagtaaccaactcggttatagcatcggaaatcgtgggcttacgattgtcaaatcggtgtagaatggatcctcgtattctgcgcgcacaatcttgttcaggtcattggcggctgaatagcgcggaggaatctgctcgtctctttcgaagacagagatattcgtaaagcccgagcgagtcaaatgaagagcgctggagagcccgaaggctccgccaccaacaatgatgatcgggtcgcacttggagatacccattgtgaaatttgatgaggaacttctaacagatggcctaatagttcgatatctatagctccaggccaatacaccttcatgagtcgacggcgtcaatgccgactctccgggagtagtgcggggagcgcggagaaatggaccatcgggaggccttccgatgtgcccaaatggggttttggatgtttttgataagaaaatgcaagccacgtaagaggtcagatgtggaaatgataattagaataacgtatgatatggtgagggagtacatttagtcagagtcactttattggtacaagcaaagtatacgaaacatagtagcataacagaaatggataaatcagattattgaagtcctacgacgttaaggacagaggctggctcctattgtgtcttatactaatcttaaaagaggaactgatgaaaataaatgaaagtatgcttagattgcgaaagtgcatatatgttaacaaaaaacctataaactattcattttatatctcaactttagtggttgctagggtacataaacccctcatcctgatcaaagaattcctccttaatcaaccgtgggctaacaaagcgacgcagagtatcagagctaccagccttgtcgttagttccgctagcacgcgcaccaccgaaagactgttgtccgataagggcagcggttgtcttgcaatctgtaagaggtagacgattagatatagcaacaattcacgttggtactgtgcgacttactgatatagaagttgccggcagagtatcggagcttatcttcagcctggcggatagcaccacggtccttagcaaagacagcaccagtcaaagcaaatccgcctccattctgatcaacagacttcaaaatagaagcccattcggcatccttgtaaacatacagggtaagcaccgggccgaagatctcctcgttgaagagacggtggtctggtgaatcggcttggtacacggtagggtgcacgtagtatccaacagattcatcataagtaccaccagcaataagcttcagcgaggggtccttgttgctagcatcaatgacggacttgatcttctcgaatgatgcacggtggatcacggggcccatgaaagcctccaaatccttgtccgggtttccaatggtaatctccttgataccagccttcaacttagtaaggaactcctccgcgcgagactcaggcaagtagagacgagatgtggcggagcatttctgaccctgatactcgaatgagccgcgaatggtgtggttgactgcactggtgatatcggccgacgggtgaacaaggtggaagttctttccgctggtctcggcaacgaagcgagggaattcgcggtatctcttcgcagcaacaccttgtccaatcttgccatacagagagcggaagacatcggaagaaccaatgaaattcaggccggcgaagtcgcggtgtgcgagcacagtctcagtaatggcttcagggtcaccggtcacgaattggatcacattgggagggagaccagcctccaaaagaatcttgtagagcaaagagctggcgtagacattagatgccgaaggcttccatagtaccacattacccatcagcgcgggcccgcaaatcagattgccgccaatggctgtgaaattgaacggggagacagcgtaaacgaagccctctagaggacggtagtcgatacggctgtgactagttagcaaatgatctgcgacaactcaaaccagtcatactaacctccacatgccatcagtgccacgagttggctgcttctccaagatttcagctgcccagttgcagttcaggcggaagaaatccgccaattcagccgcggcatcaatctctccctgccaaatgttcttcccttgtccgagcatcgtagctgcaataatctcgtatcggtacttggtgcatagcaactccgcagccttgaggaagattgaagctcgatcaacaaatggggtatcctgccagctttgctttgcctccagagctagttcaatagctgaccgggtctgctcatcggtggcaagtgggtagtttgtaaaggtgacggcatgttcggcaggcaatggttgatcccaagacttggagcttgcctggaactttccatcatagaagagctcactccgcacgggcagctgagagcggagcttcgtcagtgctttttcaagcttggcgcgctccggggagccttttttgtatgaaggctatagtgtgattagcattgaggtgggttaagtagttgtcgcactcacgtttggttcgtttcgagcatcggggagacggaatggcatagtagtcttagcccgagtctgaacagagagtcctgcaggaacagagcgcaggcgagagccaataggccgtgccgagcggagtctcatgagtgtagtagacatgatggatcgcaaggttgagtttagtgaatgacaatgtaaactcaagaaatcagtttgagacaacagactagtttaaacgtcaacgacccctcttagaaatgtcggaggcttccccgtttaccccacagaactattgcagtgagcttgagctccggacaagataaagctaaattcatagctgctgttcgaaatctgcagcatcgggatgccatccggtgatcgtatcaggcttgattgggtattgtaatcatatatttcaagtagataagcatgagaaatcatgactatgtgattcaaattatcattatgcaacaagaagctcaatcaaatgaagctcgctggggcaatcctttgctaggacagctagcaggcgatctcgccgcggcagcagcctcggcgtccttagtgacacccgcggtcgcaattatcgataggttcgtctggatgtttccaagcgcgatgatttcgcgctaatacataccctcagagcgcttgtcgagcaagctgccttcaaacaacccattctccgcggacttcatcggcatgcgctcgcggccctccgacggccgggtctgtttgttttccaacggccattcggtattgtctgggccctctatgcggcaacctattccgtcgcaaatgtgaccgacacaatcagtcacaagcttgagataaccgccgcggggacgatcacatttgccacgacgatgatggccaatgtgccgctagcgctgtggaaggacatccgatttgcgcaggaatacggaaccggcaggggtcccgatgccaagacattgacaacaaacactccaatctctgtactccagaacaaatctttggcacgaactgcagctgctatcttcctcgcacgagacggtgtgactatctttgggtcatttactttggccccgtggttgtcggatgccatccccgaccgcttgatgactcatcccaacgcaaagccgatcatcacccagttgaccgtgcccgtcttaactcagctggttgctactccgttacatttattggcattagatatgtacacacggcaatatactatgcccttcctaaaaagggtaaagcactcgcagcgatatctgccctcgtcaactttgttgcgttgtgtccgtatcattcctgcgtttggaattgggtgcttgacgaatatagagttgcgatctgctcttcatgccaaagtctcgggttgaattaattatttatctcattatcagtccatgtcctacatgaatggctggggcattctacctgtgtggcgttcagtccacctttctcgatatcactgacgtgcgccagaatctccgtctggtagggcgtctctcgtgcaatttgcacagtatcgaagacagacttcgactgaacaaaaatatcatcgatctcctcgagtgtacggcccttagtctcaggacagaacaagtagaagaacacacaagcaaaggcgctaatacatgcgtagacaatgtaataccgccagtggatagtagcgaacccgactgggctcacctctgccaatacgaagttgaagagccagtttgctgcagctgccatagcagtaacttgagcacgagtttttagcggtgcgatctctgcggcgtacatgaatgggacaaggaaaagtccaatggggaagcagaaaagcgctacgaagtagaacaagagtgaggcgccagccatggatgtgtttttaagatcactcgatagcccagccaaacaggcctgggcaatggtcataccggcagccgcagcaatgagcaatggacgacgtccgacgcgatcgatgagtagaacggccacgcctgtagccaaaaattgccagatttgcagacacccagtgataattcccgagagtgtacctgagtatcccagatcgcactggaagataatatcagaataaaaagtgatgatgttgatgccggtcatctgcgctagaatatttacaccaacagcaataactgtacggtgcaggtggcggttcttcgtgagcgcgaatggcgacgaggaacctgctggttcggcgttctcgtcaatttcaagtgactgtcggataatttccagctcctgtaagacatgctcagagtcgacagccacattttccatgcgagctagaacttcagatgcctcctcgagacgtccgacacgtgcgagccaccgaggagactcgggtagcagcatgatacaccccacaacaatgagaccaaagaggccttgagaggcgatgggcaaacgccagctgaccgagctatcactaacataggagagtccgaatcccaaccatgctgcgaaaacaacgccgccaattgcaaaccatccctccagtagcaccattcgtccacgttcctctgctccagatgactcggagacgtacattgggattgtagcggtaaagccaccgacaccaagacctgttcagttactggttaacttattgcaatctgttcaatgataaggggctttaccagtaatgactctgccagcaataagttgaccgagtgagaaagaacttgcttggatagctataccaacgaaagctatgcaaccggcaagaaagatggtcttgcgacgaccgagtctgtcacctaaaaaggcgcaggaacctgcccctattgcgcatccaacttcatagatagcgaccgttgtaccttttaatgatcaacattgctctcttgaacatctgccagctgattcatccgagtagataccttgaattttagagttgtgagatttctcacgaccagtagtttgaacggtatcgacttgagggaatacggcgatgaaagagtctagtatcaacaggccattggcaattgcctgatcgtagccctgcagtatgaatccgacagccccaataagactgatggcgaggctcaatgacttgcctttgagcttaggggccatagcgtccactctacctaaagtctcttgtcggatgagttccaaatcttcagctcgcgattccaacacaggggagaacaccagaaataaaaaatacggtactcgatacagcaccccacttagtagatcctgaagcggagggtcccagactaaaggagacggactacctgggacttctagaagaaagacaaatctgccaagcttcggatgttcaccgaatgggccaaccagcttcgcgcatttgacggtaagtggatctcgagtttcttcaagtttggtgaagtacagcgctaataagtggctggccaatcaagttccggattatcagcatccgtggccccggccgcccgtagtttctccgcattctcatccatatattattgcctatagtcaatatttcatgttgatctttcctcgttccctactaatacctcaaatccacttctccctagttcgtaggctgcatgtcataatttaggacctttgtgtccagacgagagggctgtgagcctgaaactttaggtagcagtgagctcctagcacttgtcatgttcatcctccatcacatgacttttggcgcgatctgcacgattgcccatcacgtgactatatagatcgttgacaccttcgttccttcctctttggtatttggctctttcctttgttttttcctttttagggctgtctacaaccttatttaagcgagacattcgagttttgcaccgtttgcaggaaagccaggtatataaacaggctgattcccacttttgaacttacttcttctttctctcttcatcattttgaatcaaccacatcacagagcaacccctccgacatgttatcgtgtccataatccatcacatgacttgtctgctcttactgtctctttttcatctacttgcattcatccttcatgcaaccaccacatcacaggcatcccttcatggcacctgtcatgttcatcatccatcaatggcttgtatgttcttgctgtctctttttttctcatatacttacattcatcattcagacatcccaaccacattctccttccacattcaatcttccacttcatgaagtttgtttcttcttgtctgtgttgtgacctattcttcatcttccctcatcatattctatgacttggtaaacacctgatgacatgaggctgactgtactagatatgtatgctcaaccacatctgctcaaccatatccagccttgccgagacagattccgccttcaggactggcagcatgcttgcaacaacagcaaacacaaaaacagaaacagaagagaaaccccccccccccccccccccccccacgcaccaccactactgcgatgcttcgaccttaaaagaggaggaatgaaaagaaacggtcttgaacgacagagtctccgcaggagtgtctctgaaggagacttctcgtcgggaagaggttacagcgtgtacccatttaaaggagactctcaagaccgtttgctgtggtggtataaaaaaatggtcgcctcgacaagcatgcatcgacatccaagaaccacatccaagaaccacttcaatccatccacttcaatccatccacttcatccatccacttcatccatccacttcatccatccacttcaatcaaccatcgacattcggcattcgactactgcgatgcttcgaccttaaaagaggaggaatgaaaagaaacggtcttgaacgacagagtctccgcaggagtgtctctgaaggagacttctcgtcgggaagaggttacagcgtgtacccatttaaaggagactctcaagaccgtttgctatggtggtaaaaaaaaaaaggtcccctcgacaagcaagtatcgatatccaagcatcgacatccaagaaccacatccacattctactcattcacttcaatcatccaccaatcacccacttcaatccactttaatcaaccttcaatacacaatccacaatcaacaaaattcagattcaatcacccatgatgcttcgaccttaaagaggaggaatgaaaagaaacggtcttgaacgacagagtctccgcaggagtgtctctgaaggagacttctcgtcgggaagaggttacagcgtgtacccatttaaaggagactctcaaggccgtttgctgtggtggtaaaagaaaatggtcacctcgacaagcaagcatcaatattcaagcatcgacatccaagctcaaccgcattcaacaaccatatccaagctacacttcaatcaatcttcactcaactatccatattcaagcatctactccaagcaatcatatcaagcaaccccttcaaggcaaccacttcaaggcaactacttcaatcaagtttctacatccaagcatctatatcaagcatccacgtcaaccatccactcaatcaaccatccactcaatcaaccatccactcaatcaaccatccactcaatcaaccatccactcaatcaaccatccactcaatcaaccatccactcaatcaaccatccactcaatcaaccatccactcaatcaaccatccactcaatcaaccatccactcaatcaaccatccactcaatcaaccatccactcaatcaaccatccacttcaagcatcgacattcaaacaaccatatccaatttccacttcagtcaccatctatattcgactactaccatgcttcaacctttaacagcaggaattaaaagaaatggtctcaaactacagagtctccgcaggctctaaaagagacttctcgtcgggaagaagttacatcgtgtacccaatcaaaggagactctcaagaccgtctactgttcaggtaaaaaaacactatcgcatggacaagcaagcatcgacattcgaacttccacattcaagcttccacttcgagcttccacttcgagcttccacttcgagcttccacttcgagcccacaaattcgagcttccacttcgagcttccacattactcaactatccatttgaccacccacaatgcgcttccttttaagaggaggaatagatagactcaaacaacaagtgtctctgcagcagattctgtctgtcatatactacatctcgttacaaacccttgctccattcgtaacattccttgtagcatacatacatagtcgtttctatagaggcataaaccacagctaaaaattaaactcaggtaaatcagtaaattaattaattgaaagcaaatcaatgcaaaatcttacgttaagcctcattcacatagtggtcaggtgaccacccggacaccctcagatctagatacgaatagtaactccctcttcgcacccattaacactttgtactttatacgcaaaccccacgattttaccccagaaaaccacacacaatcgtggccttcccgcctgacttatacatatcgcttaaatgatgtttggtggtttagcgctcgtgcctgagctctctgacagcatgcagatctttacctaaccttcctctctatacactatacaggcctaatttagagaaactcgaggtataagccagtgcaatacattgatcataaactcatatactaccggatacgctatgaagatggcgaaagagaaaacgtcaacttggctctgcggaaaacctccgccttcaacgcccgatactcattatctgtccgcagaacagcatcacgattctcaattgctcgacgcagaagataggccagacattcacccatatctccccaagtcgagcatttgtaaacctccggtgtcccatcgccgtcattcatctggagcagcgtgaagctaacttcatccgacataccatggagttgggcgaagcgcacaggcacggtgggcaagcccgacgtgacacgatgcttatagagtttctgggcagcgaccacactctccttgttatgacttgccaggaagagatttaccgaggggaattcgcggctgcccttgtctccaaattctccaatgttctttctcagcgccccctgagcaatcatattataagcgttgtcggtgtcttctttcgtgtcgtggatcagggaccgttcatcggtggccatgtatgcgcccctcacgagcttgaggccgagagtgaatccatcttcacttgccacggttagatggttggccagtgtcgctggtgtgcttttgaggtaggcctggtaggtactgtagatagttgcataaccgtcgcggttgtatttgcgcataagttcaacagcgacccgtgcaatgcccttttggaaatgctgagactcggcatcgacgaggatgcgaacttttcggtctttggccttggtgcagatctcatccagtgcgtccatcatttgctgcggaggcaaatctccagcggcgaaggcctcggtggctttgatgccagcacctgtcaatcttgtaaatggtcagtcggtaccccatgaatgggtggtgtgagagtaacttacttgactgcgaggtaatcttctgcatctgacatgtcgatggtctcgactgttcccttccgccaagcttcgatgctgggacattgggagaccggagcattaatcgacacgttcccatcctcgcttttcaaagcagcaacgccctgtccgtgctgagcctgagtactatgatcaaacacagtctcagcagcgtaagtcaaaatcacaccgcggaagcccatatctttcatttcccggatggtagatctgcattccgccgcattctctccggcgcagaattggttgtagaacgttttctttaaaattccatgcaggatcggattccgatccacatcaaagagccagatcctgttaggtttggagaggaaggacataaaggaaagcgcgggtatgaggaggaatctcttcgacgatatcgtagagaccagcagagatctgagcaagacatgcgcgggtaagatagagagaggtggtaatgaggggcttggatcagtcttgacttgtgcctgtgcttgcaatgttgaactaaagcgcagtctcgtggaggcaggcacgttgctcgttcgaatgcatcgcgcaagaccggttacaggctttccgggaaataaggtacgcatctctgttatgatgttatgaatttcaactgctcattccaaattagacgaagggaccagcttctttatccttcaacattattccccgcgtatagtaccagatagtatatcggacaggcctccggtgcttttgatagctgaaacccaccatgcggggtgattatcgctggtgctggtcagtctctccacaagcagtaatggaacccgcaaagcgtattcggaagaccgttttcattggtggtccagatcattccttcgtggaatgtctgtacggaagactcgccggtggcggggttgcttgtccatgttatcaacggtatgcctaccgacagtacctatttttatcaagtgacacaaagatagactggattgaagtaatcgttgtcaagttactaacggctcatttcatgtagttgtacggaatattgatatcttatacaactcatgttttccgatgtagatttgctatataggctaagggcgaagagagaatactaaccacagctacaatgatgcacttatcggaggaaaatatcattcattcctagatataagtatgtaacccttagtccattcttccttatccgctagcttccaatttccatttccagtctaacaaatgagagcagcctacgcatggcgcacgagacagaacatcagaccactttttattatctcttttctataaaacccactcgttgccagcattagaaatcctcctcgaggaagcctacaacaacccggtatacctccgactctccctcgagctcgccgagccaggctcaacaatgccgttcatggttctcagcgcgcagtaggtattcttcggcggattctccctcgcatatctcatcccgcctcagatctgttatcgcttcgtgggatatatagaaggagaaggagctgtgatcacagactgacaggcaatccatgacctcgagaatggtcatatgcctgaatgggagagctggctcccgagatggcaactgagtactggcagatgccgggctaacgctgtatacattcattgctgatgtatatgtatggtgaagaagcgaaatattgtgatttcaatcatactttagtgaatttagatcagaatcaagatccgaatccttttgcggcggaagttagggttctggttcaattttcttgctcgtccagggagctgtagggaaataggtgcttgattgaggaatcagtatctattctctttagtaaatcttcatcactctaccattgagtgtgtttgtttatggaaaagaaatcactagagctctatctaccatggaagtggatgttgaacatgccgataactacgtgagtcgctagatataactaataagtaaagcttttgttatctacacaggtgtaaaccaagcccaaatttgagaatcgtgccagataccaagttctgcatgtggaaaaaggcgatgttggacgaaggcgggtgagatgccgaggctcgtcgggaggtggtcccgactgaggcctagacatacaactggtcagcgacgactgtatagagttctgactgataattgcaacccatttcggtctgtttaactggcttctggtcaagttaggaggcatttattatgtagcggtgtgggtttgatttgagtctaaccgaatatgcaatttcgctagccgatcaagggcgactatcaaagaaacttgagattctacgcattttaaacatactaggagatacggtgctagacatgtagaagagaaatccgaatgatgcccaagtaataccatttttgggataaaagagtagagatattgtaagtacatgcaggagaatgccacaccagaaatgagaggcctgataaccaaagcatgtagatatacatagctatgagtttgagggggccgaggaaaaatgccgtgggtctggacgcgtctgcgttgtgagctggaaccgaattaggcgacaatgaagtggcctctctagagattccacgtgcctttggccaagcatatctttcaattgagtctgcaaatttgggatctgcgggtccacgcatgctacgggtgcattaagggctccgatgcgcggaccggtcagagaaatccggttcacttctgcgccaagcgtcattttgggcatccataccgggggggttgggtccggagttggtgcgagagcggtggtggcagagcgttttcagtgatcagccattatcaaacaagggataggctaccacgctgctagtttggtgaaagtcgtgtgcattgccggtcaatgactgtcgtaatcgaggccatgacaggaatgacacatcgcaggagatgatatcaatttcgaatgtaaaacaatcggtgcctaataactttgcgccgataccgccgcgggctggaataggttagcgattcgttcaataaggtacgggatgcaccagcgattccatgggcgataatccaaagaggggttccttacagggctgttcaacatgctgttgcgcttgtttcggcccttcttgatgtggtttttcagggcggttgagtccaagggcttgagaagttcgaagctgcaaagaagttcgccagagactgacatgatagcgccccaattatcgaattcgccgcaatactgtgaaaagtcaataagagtcatagtaaaacacgagagaagagaacctacgttgggagcagaaaacacagtcaccagaatacgatcctggtagaactcatatccgtcctccaccaccatgtgggcacggcagaccaggtcgaagtcgtgacgctgcaaaaagtccatgatcaccttctttccgaagcagtagctgacgccacgctcattaggttcccaatcttcctccatatctgccgggtcactccacacaaggtcgttcaacagaccatagtccggcacgtcggtagggcgagcgatgccgcgaatgtcgtccatgtgcgaaagactaggagagagaccaccatgaacacagaagatttttccggccacaatcgcagcaatcggaagacaattaaacgtatcgatgaaggtcttccagaccttgatgttgcagcgacgcttgcactcatcatagaacccatacacacgggtaacgttggcacactcatggtttccgcgaagcaggaagaagttctcggggtatttgagcttatagcacatcagcagaaggatcgtctccagactctgcttgcctcggtcgacgtagtcgcccaggaaaaggtagttagcagcgggagggaatccacacatctcgaaaagtcgaataaggtcggtatattggccgtgaacgtcgccgacaatcttcacgggagcagacagttccaacagagcaggctgcgacaggaagagctcgcgagcggcggtacagatggcggtaatctccgcattcttcaggcagactgttttggtaaccttgctagaataaccggcgtccaggagtcgcgaaatcatgtcgtccaaatcaatggatttcaaagcacccatacccattccgggagatccagaagtctccagaggagcgttcaagatgaagtccaaaatgggattcagctggttctctcgcttcatcagaattgattcaccagcaaccgcggaggacccggttggggggccaccagtgggagggttatctgacacaaggtcgacctcgccgctctgcttcatcacatttacatccttgtgacctcgttgcagactggtggaaagcgagggagacggtgggggttggggggtgccgggtcgcgacgcgtcctcggaacccggcgaggggaggccggcattagagccagggcggcttccgacggacttgagggagcccgcatcggatttatcggtctggctctcagtacgggagagagcagtggtggagccccgagggctatcggagctgcgggccccggggattttggatcggatcgagccgcggaacgagcggagagactctttggtgtcggacttggaaaaggaagggtaggactgcagagtgtcgcccgaggcgttgcccttggaatgcgactgacccatcactacaaggcttaactgccaagcttgagtttgcgatggccgcaggaacgatggaagtccgaactgttatgccaagaaacccctgttgtgttgctggaatgtcttggcccgagcttctgcaatgatacaaaaagcttggagcgactctgcaagtgtacagcgggttgtgtgcggactgtttatcactaatccaactctgatcggaactctgatcggaactctgaggaacgctgaggaacacgcggaaggcaagtgcgagacgtgaacacagttacaagacgaatgaaacggacgagatggcgatgtcaaactgcagatccaggtagcggaccagagctttgatcactgatgcaggtcgatcggttttcggaatggtgacaagctaaaagataaaggcggaaggaggctgaggaagctctaccgaaagttagtctcttgcacgagacaatgcaggtgcgggattgcagggctgactccgcagaaacccagatggcatgtggaggtattagtgagatggaaaagaagagaaaaggcaagggaggtccttgaaaggagcagaactaggaatggtaggttcgcgggtagaggaatgcgtcattatgtacgggggggttgaaagggtggtcgtccacgtaataggccacagacacacccggggatataatttacctccaagagaatccaatgggatgagatgtcacagaacagggcagaagctccctgccagagtgaaaacaagaaaagtaagagggggaggaaagttgcaagtcaagaaagtcaagggaaagtcgtagagaggtagggaaaaagtactccgccaccgctagcacagcgaaaaggtactttccgggtacaacgttggctgtttctgtggtttccgtttcttgggccggtctcgatcgggctggggggattaggtcagccggagtatctgccgggccgggatatataaagaactcggacagctgcctgattgaggaagcgagtcggagagagtctggactgggagagtcggcgctctgatatatatactgaagatctatggattcgggggtagtcaatgatcagctttaatcaaaaggttatttatccttttgggttattaaactaaaactagtgtctggagcccccaaggtctgtacggagtatgttgtatatctatccctttaccgcttcacaccgcacaaatggaaatatcttctttgtcttgtttcttcgatcttgtgacccctgactctgaatatctttttaatgtatcatagtctaggtcaatattcttgtgttttttggctgtcgttatgtctttgggatcacccacttattagcgctcgataagcgacaattctcctacaacgtacatgcatttacatttgcatttgggccactgaaaatagccgtcacagatgcattggtagagccactcaaacaccaagaatctttttccgaatctacccggccactcgcaagagaatgtatccggagcttggaccccaccaccctagggcgagtcttcctatcagaagtgatggagataaaaagtggaacacccactgactcaaggactcaaacaccgttcaaaaacaaaatgatacatcacaaaatattatacgttgctgcgtggtagggcataagctccctgcaaatacttccaacagtggaaggcggctagagaacaacagacaacaccctgtctcatgatcagattgcagcggaagcacacacgagccacatatactcttggttctgcaggaaaacaaccacgctgtatgccaagggatctatctctgtggcgaagacaccgctatttcgcccctccattaccccttgttcactgaaagcgcctaccacaaacaatctccctatccgataacttcaatgtcgactgcagattgcctgtcaagccaccttgaatgcagctgctgtgatcccggtgccacgttggcggagaagcagcgagcgccgctgcaagaaatcctcttggcagccccacgtccaagtctagtcctggcggaaagcagggaccggggtgattgtgggcgcagggcagaaaccgggcctttcctgcggcatatcgcgtgggatgcaatagatggttgtcatgctgcttgatagtggggcagtagagctaggtttatcattcgagaataggatagagaacgatccccagatgggaaaacaaaggtctcgtggatacgagcccgggtcggaacgaaaattaacgcttactccagctctattttcgtaatgtgtcgtcctgggatcacaatgaggcctatcaaccggtgtgtcatgtccaatttgaaagtcgcgctctttgcttccggcccttcttctagctctttctcgtgtgcagcggcttgtacggcagatgtggagggcatacgatattcaaaagaattggcgagaatgatgtttcggtcctgtcaagcagttttcgattagtgccattcgcggtgtgctatttcaaaccctatagcacgtaggttcatacgtgactgcttactgcatccgtacacttgaaaagcccaagaaacatccggttatccgtggtatggatccgcagtgtgcgacccaacagcccctccaagtatttaacagactgatcgtgatccattgtggttggtgcgtggttcgtgtcagcagcccaaggacctccaatgtgcgggggagttgaagtctgagggtagagctgaaaaggactccgatgcaggaggaaggacagtgtcgaattattcggggggttggcaaagttaagtaattgctcttgcagtttgggattcccctggcctggttcaattgaagaggggacgacgtcgggtggacgagatcactcgggtggacaaacaacgttgttggtgcctaaggccatttaggctaattggccatcacgctagaatctacaatgttcaaaaagctacggagtatagtgtttaaataatgaaaagtcagtatacttgaaagtagcagctactagttttattctatacgtatgtaacgttgcattaagccagatatttggcgatgtatgttcattaaaagtcaaagccgtcttcaaactatccccaggcttccactgctaaagaaaaaaagtctctcgagaaaggatgaaaaacaatagattgtaagtagccaataacaccgtgccaaaataacccaataggtatcacaaaatagatagaaaggtaatgataacctctcctgatttaaacaccagcgcgcaatgttgaaaaaggacccgtgaatggaattacatccaggtcattccttctagccagttcttgggcgcttgacccaatccatcactagcgcttcagtccatatccatgtccacatcaacactctcctgattggatccaggactattgctctcgctcgggctgtctcccgagattatttgattaaacgcctggcgacgcaggagatcttcatgggcctgcgcagtctcattggcacgaggtgcaagtgcttgacgggatggtcggaaagccgatgatggctgaggttttggttggaagaatcggtgtaatgtttgctgtcgggggtcaaggacttctggtgtttcgggggttggctctaagtccattgtatccatatcggtagcctgtgtagactcctgctgcttttgggcggagaagatccatcgtagtgtgttttctgccagctgtcagcgattgaacgttgacgcgatcaagggagagtactcgggggcatttacgataaatcacttggtcactaggacgatcgtctctgaagcgttttcgcgttcgactgtggagatgtgggctcccatcgatcaccatgccccattcactaggggctggagctgacggactggtcgggagagctatgaaggaggctttccgcttgagggacattttcggagcttggtgtatatagtaaggtggaccggtaggggtttgtagaggtaattgcatatataaagtcttacagaggaggtaatgaaagagaagagaagaggaattgagacgaggactggacgcaaacacaactagctgagcgcgtcattcgcgggattcgcgttgcattctgtcgggctaagccaaaacgggtaatataggtagcaggttggatgctcataacaacattgacaacattggcaacacgctttgatatttgtaaagaaacagactatttttactcttaatagatatcgccaacctagagtatcaatgccattacttcatcatgctatgcgtagtcgcaatcattctttcggtctccaggactacaagcataacatatgtatcccaggatatacaatgaacttttgataacactttcttttaaaagttttttctattcagctattcgacccgtaacttggtttgccagtgcatatcttggtataggtacatatctaaatgatactcaaatataaattcatatgagttgactaaaatgaccaataccgcctataaaatacatgttcactacaaatcttctctatatctgccaatataaaatccaataccgatatcctccaatatcccgacgtcttccaatgacgcgctggctgttccgtgggatcccccgctccccccacttcttcaattgaagagtagagcaccacttcacatttgaccttgaccttgacctattaacacaaatcataccatgccatctcgacacgcctctcactctggatcatggtactcagatagtgcccgcaccctagcccgtcagctggatggctggctggcgcaggtgccagacacgatggagaaggtcggctcactgccaaccccaggagccagagtgatcatcgcaccgtatgtctggacctttatcatacatatggtattatgcagaacaaacatactaatcaaccaggcatgcgggctattcatactcggggccctgcgcagcctacgcatacaaggcgctggatctctccaaagcgtgagcttatctcccgcttcttctatgaaagtctctaacctcacaataggaagcgaatctttatcctgggaccgtcacaccatgtttcgctcgcaacactggctctcccgacgctaacttcctaccgtacccctctatccgatgaacccctcccactagacaccgagctgattacccagcttctcgaaacccaggcaaccagaccaaatggggcgaagattagcttcacaaccatgtcgcgctcggtcgatgaagacgagcacagcatcgagatgcatctgccctacatccaccgcttgctccagctccaatatccagattctccagcctcggaatatccacctctagtcccaatcatggtcggaaatacctcggccgcgacagagcaagcattcggagcccttctagccccttacctggcggacccgacaaacgcttttgtgataagttcagatttctgccactggggtctccgattccgctacacatactatgttccacaggcccccacgccagggccacaactcccattgtctgatgatatacttccgcaacctggcatggatgcaagcagcgtcgatcaggccgtcaagatggcctcagccggtcactccttgcgccaacgcgatcgcatctcaagcagtcaaccggctattcacgagagtatctcagcgtttgacatggctactatggctgccatcacgacgggatctgcaaagtctttcctcgacattattgaacgcacgggtaacacagtatgcgggcgccatccgatcggggtaatcatggcggccctggaaatcgtcacagcaagtcaagcagccgagcaggaaggacgcttctacttcctgcgatacgagcgtagctcggatgtagaagatattgatgatagctcggtgagctatgtctctgcatttgctgtgctttaatagtgcatcacatggccttgatggcagggcttgtctccttgcttttagttcggatattgggcattagcgctagcgccaaagtaagattgcaatcaatgacttatgagtatccgagtatccgaaacagaaattacatgggtttgacttgtccaatataacatccatgatggcatgttcacccggagccgtgaatgggatggactgtacggagtagcattcacctaaatcaccagtttcaatctatgacaggctcttcgcagcactaatcactcggctttatattcctggcttccacatattgccataagctggcactcggtagaagcacatcgacaaacgaggtcctcatctatcgtgggatagagcggataactccgagtattccgagtattccggctttgtgctcagcagattaggagatcctgtattgataatgaagggtcgcgacaaacgcctcttgacttttaggccagggtctgaaacatattaaggctgagcaccccactgtcgatggctacacttgtggatacacaccgtgcacctagtgcgttgtgaatggatccctgatctcttatactgtataagaagtttcagaatgagatctatcaaatgcctcattaccctaatcaaggaattcaccgttatcaaggggggtcaacctggaacacttaagtccctgaaattagccgctgggctgttggaggcgttattcggccaatccgacagccctaaagtcagataactctgcccctgagtccgttccagttcgactaatcagatcgcagaaaagcttctttcggtttgtttgtccagtgggaatctacgggttagagaacccccgcctggcaaagtggcactatggcagtcggggcgccagcaggattgatttttccccttgaaggcagcagcccactttagggcttgtctaattcatctattgtccgcatattccgtacaaggagtggatcttatagagaatgtggcattgtgaaacaaagcgccaaaagcatataagacttctttaagtcaagtcctatgtccgacctttgatatgtttcttttctcacttctcactccagtcgctccttaagctggatacgtctttcattcctttttatctttcacgtattccagcttcatagagtggagatattccttggctggttcttggaaatcttcaccgcttaaacagccatgttcttcttattcgtggccctggttggcctcttgcctttctttacattcgcttccccgattgcagtcaacactaccaacatgacgtcttccgatcaaaacataggaaataaactagtcttctgtcattttatggtgggttatttattgcattattaaaacctgaataaaatactaacgctatctagatgggcatcgtcggcaaccgcgaaggcgccagcgactatgacgatgatatgaagcgtgccaaagacgcaggtattgatgcatttgcgttgaatattggcaccgactcttacggcgacacccagctggactatgcctatgaatctgccgccaacaacggcatgaaagtgtttatctccttcgattttaactggtggcaggccagccagggaagcgaagtcggcgtgaaaatcgcgcagtatgccgctcatcccgggcagctcctggtcgatgggaaagtatttgtttcgtcttttatcggcgacggtgtcgatatcgacgcaatcagatccgctgctggcagcgatatcttctttgcgccgaattaccacccaggccagggcgatttcgataatatcgacggcgccctgaactggatgggctgggatagtgatggaaataacaaggctccgactgctgggcagaatgtcactgttgcggatggcgataaggcttatgcggatgctctccaagggaaaccatacattgcgcgtgagtatgagtatgtctgttcttctatgcatatttgctaattgaaaaatagccatctcgccttggttctcgacccattacggcaccgaagtctcttatagcaagaactgggtgttcccttccgatctcctctggtatgagcggtggagagagatcctacgtctcagccctcgctttgtggagatccttacctggaatgactatggtgaatcgcattatatcggcccgctgtcgtcgccgcacacagacgacggtgcttcgaagtgggtgatggacatgtaagtagagatatcccagtaaattaacaaagcaactgacaaggaagcaggccgcataatggctggctcgacatggcaaagcccttcatcgccgcctacaaagccggctcgagactgcctatcagattcttagaggaagaaaagctggtctactggtaccggcccactttgaaagacgtcgactgcgacgcaaccgacaacacaatgcaaggcagcgccaacaacgccagcggcaacttcttccgcggccggcccgacggcgccgacacaatgaaagacgaggtgttcatcgtcacgatgctgaagtttccggcgaaggtgcgggtgcggtcaggcaataatactgagacctacatcgcgcctccgggagtctggtcacactcggtgccgatgggcgtgggcgcacagagtttcaaagtcacccgtggcttccagacggttcaggctttgtcggggacgagtttgaaggatgttgtcgacacgtgtgcctgcggcatctacaacttcaatgcttatgtgggcactctgccggcagcggacactgttgacaagctgcagccggctgggttgactatgttgatggacgggttgaaggtgacgcccgagatcaacgctctgggttaatactttggttgggccgttggattccttatgattgggtataagacctatgtacagactggtccgctcacttgatcggaggtgagggttatatgtacaacatcaatagaatacaacagctggtataaccaatgttcgtcctcatttaaatgccgtgtcatcgttgaacatctactttaggccagataccgagtaccggctataaatcagcgaaatccggagtattctttgatgcagacattgctagatacaattccgtcattctataaaccgacctttcgaatgcgagtttgctattgatcgtggaatatcttcaagtcgtagtataacatgttgtagtataagtataagtaacgatctacaaatgcccgaattattttcttccgcatttccttatcttgtttagtcccagatctaccagatacaacggccataaataatccatcgcattccctttatcttcaccgactctttgcccacgttaggcacttggcgctgcccggagtgacgggaacattgcgcccgagtcagcaggtgcaggtgcaggcctcgtgaaactatttaggaacccgatctcgccgttgtctctttgtttttggtcttaagagttatcaacaatggcccgtataaaacagggagtcttctcctgggaggatgtactgcatcagcggttccagagtaagcaacgagctcctattcctattcctacgcttttacatctgaatccccaaatctaacagatctaaaaacaaaacaggcaacaaaccccctcccctcccccgccgccaaacaatagcgttctccgcaccccaactccaaagccgactcctcacccggctatcaccggagcttcggctaatgatctggggattcgtcctcgccggccaacgaatccacatagtccaatgcagcaagcagcgactcgggcacgtggtgtgtccctgtgcgctcgagcccagatcttcaccaccgaaacgccacacgcgccagaacagaaacttattctgcgagatctgccatggcacgggcatctctcagccggcgaaagaggccgatctcgtgcgctgggataaggttaagctactgggtctggccttgacttgtcggcagatgtacggttgagatattacccttcctttccttccttatcctacctaccctaccctaccctaccctacatctacctatatgatgtatccatgacctctcctctcctctcctccccatctcacccagagaaaaggacctcccccactcccaatactaatccaaaaaccagataccacgaatccatccccctcctctacaccctcccaaccctagaattcagtaacccctggaccctcccatacctcctccccacgatcccgcccgaacaccgcgaacgcatccgcgccatcgagctccgctggtccttcccgggccactggctcccgagcaaggactccgtgcgcgcggtctacgtgtccgccggacggacgcagtggacggagacgtgtcgggcggtctcgcagctggaatcgctgcggtcgttcgtgctcgtgctggagagtaactggttcagcgagccggtcgagaaactggctgcgtttttggagccgctgagcggggtggttgttcggtcgagggctgtttcgaggcggaggtgggattgggggtgtattgggagggatgggggggatgtggatagagatgtgcatatggatcttgatagggttggggctcggtttgcggtgaaggatggcttcggtgatgggttcagttcggacgaggactcttgtaagagtcttggatcggattctagctcgttttcttctggcactggggattcgacggtttctacggggagctgggagctccggcttcagggtcagtgttattatacgcatgaactggatcgcgtaggggtggatcttcggcggagaggtgtagattgctggatatcggcggtgtgagaatgctcgatttgcaaatcgcgtgattaatgttctatgatgcaatgatcgtctgttatctagacgatgtcttcttgtttttggcacattgcatgtctcggtatcacttcggagtatgttcaagacaccgttgcagatctacatattataatcggagtatcatcgatgcatactcggcatttctgaacgttattggtaatggatacatcctttagctcaacatacaacacaatacatatgtaacaaatgctaccatgttgctgtttacatattagaattccaattctcggctttctgatcttcccctatactccaccgcatggagattcaagtgagaccctgtacccaccgagaggagtcggcctataaatacatccaataaacaaaacacgtgtttgaccttataagaatggcgtggaatcaagatggtatccagttggattgctccgttacaggtacatgtatgtatttgtgttcatttcattacagaccctacggtgaacagaattatgcgtgagcatgatgatataatgtcgccaggggcaaaaatcgaactcgtctccaccggggacgctaggcgcggggaagatcgcatcataatcaaactatgtagtctcgtatttatggtgggatacagtgggagaataaaatgctagtattgaatggtacaagcccatatagagtaaaggaaatcgacccttgaaaaaggtggtcaggtatataagaaagaaaattgaaccagcgatcctgccaggacatgcaaaagtaaagacaaaatggccgcatccgtgactcgtaatgtgtcgtcgggcagttcacagatattagaaataagaaaggagaaaggaaaaggataggaagatatcgtcgtcaccatgggcgccgggcaaaatctatgaagtgaaaccccggttgtgacccatattaagtgcagaacggtcaaaatggtcgggaaaatcaggctcggatgtagtatctcagagagaaagaaaatggaaaatcgcgtagataaacgtcgtgattcgggcgtaggagagaaattgtatgatcaatgatcaggaggacaattggtcaacatcgccagccattgtggacggacaggcccgggagtctgctcgttaaatctgcggtcgcatatgcttgaatctttgtcaagatagcaatggtcgtccttctgatgctgacgtccaaaaggaatgctagcgcgaccgcagtggctttggtcaatagtcggaactaatgttgcctagggttcatcgaatgtcgctgtgcccggccagtcctccgatgcgagataggaggctgtggaatattgaatatccaggtcgcacaatcgttcgatgagtggtgtggctgatatgaaatttcagaagccgaggggttgttgtgatgccaggttaccagcaccaattttaccgtccttcatgggaacggtcgggtcccgagttaccatggcctcgtgcggcgagccactcggtcgaggcctcctggcgagcacctgggtgtttctggtcctcgcggcgactggtgaggccctgagggagcatgttgttaatctctgctgccagcgcagatgccatataacaccggagttccttctcttcacgctcatcctccttgatcaggcggcgttggtcggtcttggacatgttttcgcgacgcttgcgtcggatctcatggattgaccacagaacgacctcttcgggggcgcgattgcgagggcttccgtgtcgggagaaattgcggacgtagcggcgggtgacatcggtcgcaccgtcgatggagaaagccacacagtaagagatcttgcgttgccatccttcggtatacaggcgaggctgatcccaggcgccctcgcaggcatcgacgtgaacccatcgccgttggtgttccgagtacacttcggtccagacgtagtcctccgaattccaaacccaacggactcgggctccgactgcgcggcagaacatgctaaagcagttggcccattcaccaactcggcctcgtcgagattgcagtaattgccacacatcggaataccgtgggaatcgctcgtgggcggtgcagctggtatcggaacaacggtacagctcgactcgggttgcgccccgggcggtctcgtcgggagtgggaggagtcatgccttgggctatcgtaggcatgtgacatttcgagcacggagggttattaacaaattggaagaatgaccccttgaaccatctggaagatagatatgttagcaagggcgcaatggctctagatcatagggaatccacataccttaacaatgctcggatgacacaatcttggtagccccattccggtttccctgccacgctggcagcctgggcctgcataatttgagattcctcctcggcctcggaatacaggcgatcgagcggaatcacggacagggcctcatccaatagacccggattttcgtacttggtcggtgtcacggatagccccttcaataaattataaaatttcagtgaagctgcatcttggggcggtgatggcatgatgggaagaccgcgtagtgctgatgaggtcgtcggctttggagagggagcggcggtaggactccctagcgagggaggtggtggcggagcccgcgttggcggcggaggaattgatgaattggacattggagatggtgatgctgagtgagtacgcgagcgagagggttcatgaagtcggttaagtcgtttggtgcgcattagctgctcgaattcgtgtgttaaagaggcggcgtcgtagccattcgagacaggctgggtagcccggtgcctgccgtccgccatagtcgatgaggaagtcacggcagacttccaagacgatgactgttgagatccagaattcctcggaattggcgaacaattcgactttgggcgaaagagatccaatttgaccctacgttcggagaagggaagaggaagtgtaaaaagggatgtcggagacgagtagtaaagaagggactacctcgctcgagttgacgtagcacacttgaagatcagggaatcaagaagggaaagaaagaaagacaggcccttggagagagagagagagggagggagacgggattcacgtacgcagtattacgagcgtcgtcagcatctggccccaatcacgggccccgcggccaagccgcgtgtgcgaaaacgaaaggaaaaagccaagggaaaagaccctttttccccgtaatttccgtaatttacgtatttttgcctcccgtgaacacgtaacgtcgacatccagattttcaatggatcgttgctagtttcttggcgttgtctatactttgatggctgaggcttctatagacatttgggacggactcatcacacacagatgattccaagactattgagggatattgtacttctgtatttacggagtacaacgagtcagagccgaaccccatccactgacgtggctcagttactaagcctttcaaggttccagccctggtcaatataatcatcacggttgggtacaatgacgatcagtaccctgagtagttcataaggcgataataatcaaagctcgtggccgatactccataaaagcacataactttgtgatatcaagctccagtccagaaaaaaaaaaaaagagaaatatcgaggagatgttgtagggtcaacgcgcggccaaggtacgaaagctctcctgtaccgtccgctcgtccactgagaggccggagacgcgcaagcgtccgtcttggcatttcacatcggggccaacagcctccgcctaagccgctttgaggcggtgctaccggcctaatcgggcttagcgtatctagctgaaggggcgcttccgaccctccttccaacctgggaaaggcatcttcatcttctctggtatgaatgtcccaatgcaatgtgagatcctaattcctgggatacctaatcgtccatattctttctatcggaatgtgaaggtgagatccatgatccgatctcccgtgctaaaatatacatcttatgatcgtgcggatcgctagggctagtccgttttccatacaacgataccatccactggaactcattctccatcgccaatcatcgttggaaccacccacgagaagaccctggaaaatatttgaggttccagcttgtggaggtatctttttccatttgcagtcgggcaagtgtcgatctacatgtacatcgtatcggccgaacccgcgctatgtatatacccaataagccggcttacatatgaatcaggggttctagttaagactgggaagaatatattcaagtactccggctctgtatatatctagctcaatatcattatcagtcatgttcgggtgcaactacagtatagaataaatatagttaggtcacgttgatttggtatgccaatcataatgctatttttaaaattcacacgctctaagatccagccctgaaatctattacatctcatgactcggaaatttatgtattgaccaggcgttttatctggggaagtcgatcagccaccgtcgtttcatcttctagccgcgtttgagcctagtgatattctgaggctatgctgggtggctgtgcgatcgaacgcctattattgttgcataagtagttgagcaatccgtcatatgtagcagaatcctggagtttttttttgactaccagatgtttctatagttctgatgccgagaaaggtgtctcgatgcttagctcggatggcgagcaatttcaaaaaaccgggtctgtcacgggaacttccaactagtcttttttttgtcaggtatgttatttttctcttctcatcggtattgacggtaatgacaacagctagagttactaccttaacccaagcaaaaggcgattcgtacgcgccacgcaaggctcatatcagcactgattctcgtcatgggatcagtgccaccaagggagaactgaaagcaattcgggcttaaccagccgagcgaatcaattatccccggacgccaagtgccaagacctcatgtgtctcttcactttattgcttggatgatattctaaaataagacacagcttattctgcaagactgttggcgtatgctatgagcttggctctgccttttttaaggtgccaagccgatatgcatgctctccctgtggatgcatattccgcgcatctagtttccacgcgtcgacacttattcaatacctgcgcgtccctccatcttttagagatctgtcaattttgtgaccgcgaaaacagcgctatcctcaaaccggccttatccccagccaagaagagaggacacgcacgcggcataggtggctcgcggtgcagctgacttcttaaggttagccttacgttggcatagttcgacgttttactccatgcggttttttgttcaactcgagagtgaccccgccggatatacgggaccatagcgttagctagggtgggccgaaacgtcatgcgctaatccacgctaactctatcgttgtcgcaagctctcttcgaggcaattttgaatcttgcattcttctacgtctaattcgttgatatggtggctcgggtcgtcaaattgcccgtgcagacctaaattttcagagtgacgtgtatgcgcctctttctatggactgttgaactactcttggttccgacgtcagaagctggtcacgtgtttatatcgttgccttatcgcatttgtcaacccttatgagctctgcatctgttaaacctttgcctatcaaccttccaccatgtcaagcagagatatgagcaggtggcacaatatccatttctacgacgcgtctaacggatagctcctaggaggtttctttcaagccggttccgtaacggacgctaacctaatctggattctcgaggatgtgttgctagatgcggcggggcattttacgataaagcatcgcatccgatggaatttttataacatcgaataagagcgttgtccctggcgactatgatatttcctgtgatggtaaggctgaccatgaagttgatggaagagtctttgacccgatctgccgggacccaaacgacccaaaccatgtcgcggacgagctcctaagatggcactttcggtaaagcgcactcgttaagaggggtccaggagctgatattcgagtcagactttccccccaggacagataaaatagcgatgctacgaaacgaaccgtatggcaaggagagatttgagattgaggtcgaactcagtcggacctagagccagagaagaagagtcgaaatattaataagaatgaagaccagaagaccatacaaactgctaactagcaagaaggtactctggaaaatcagtgggattatctgcagaggggtgtcattgtttttgcttatccacaaggggtagggctggattttactttggctactagatatcctgcgtatacagccaaacctttcactattccaggaatgtcaggtgcagcctcttcatttatttaacagaatttacccaaagaagaatagaaagatctcactgtatagtccctaggcccagcacaacagatagcagagtgagatacatatggcagtagcaatgagctgaatgtcccttcctcttcaaaagcccgagcccctccatcttcagtattcaactattgtttcgttacctgcatgcattgaactccttggctatttgcaacatagatatcgcatcaggtcataattcagtccaatgacggtcttcatcgcctctttgtgagtttcttcttcatctacaaaactccacagatctgacatagtatataccaggttcctcccgtacaccatcgatttccaagtgacggaacctaaacatggacatcgcgggtccttgtctagccatgcaaatgtcgatggtcctggatctatcgatgaacgccagccagatgcctattatcaaactcgccctgcgggctgtctcccactaacacccggagccacgacggaagacgagacggtgttcagaggatatacttggcgattagcagatgagattccgattgccaatgaccgattgtggcacggcccgagcgagccccgtgccatttcttggggacacagccggaggtttcatcagcccaaatccaaggccacagatcccccaacaccatctatcgtgagcagcagaagggagttgtctttggatggatcacaggatcgatcggacataaaatactacagtagcacacgaagctcgctctccaatgccgaatgggtcgtcaaagctgccgaacaaggtcatggaggtctacaaaatgccatccacgctgctgaaaagtcgagcttgctcaaggacaagacttgggtggggacgctaggcatgcctaccgactcattggcagattctaccagaacagacatcgctgagaccctccaggacgtgtatgattcgttgactgtctttgtgagtgacaacgagtttgagggccattacacccatttctgtcgcgcggtactttggccagccctccattatcagatgcaagaaagccctcggcatactgagtatgacggttactcttgggtccaatacctcaagctcaacaaggcatttgcagaaacaatcatcaaccactggaagccaggtgatagaatatgggttcatgactatcatcttctgcttcttcccggcctcctgagggaaagactaccccaggccgagattggatttttcttgcataccccgtttccttcttccgaaatcttccgttgtttgattcaccgcgaggaactgttgaatgggcttctgggtgccgatttgattggatttcaaacagaggagtactgcaatcactttcttcactcctgcagccggctaaggaggctagaggtctctgtcaatcaagtccacctcaaccatcggtacgttggtgttgtgaattctccattggggattgatccctcatcactttataaattacgccaatccaccgaggtcaagggttggatacacagcatccgccataaataccaaggacaatatctcattgtagcgcgggaccgattggatgcaccgggagggattaagcagaagcttctggcatatgagctttttctcaagacttatccagcatggagaggacgggtaagtcgagtaacatagcttactgcattttatactaatttgttttcttgtaggtggttttagtccaagtaatgtcatctgcatctgagatcccagagctggaggcgcagatctcaaagaccgcaatgaggatcaatgcaacatattcaaccatcactcaccagcccttggtgctggtcaagcaggatatcagccacttccaattcattgccctcttaagtgttgcacatatcttcatggccaccaatctgcgcgaggggatgaacctgacaagccatgatttcattcattgccaagatggacagcttagctcccacaaacatggatccctgatcctcagcgagtttgtgggtagtgcctctattttttgtggccataagcttctcgtcaatccgtgggattacaaacaatgtgccgatgtgatcaaatccgcactcgagatgtcagcgggagagcagaaactcaactggaatttcctgctcgattgcaaatctccctatactgccctcaaatggcacacggggctacaagatgctctcacaaaagcccacgagatacagcaaattcgtcagacaaaccacccctctccactttcacctactgacttgaaaaggtcatatctcgccgccagagcacggatgttctttttagaagacggcgcagtcttcggtctaaatttcggcataggagagtctgtctccctaaacaaagcctgttcaactctacaaacgctcataaacgaccccaagaacatcttatacatactcagcaaccagagtaccgagcagctccagcaagcactcgaaaaactcccctgcgagctcggttttatcgccgagaatgggtgcttcctacaagaacccgaatcagatttatggattccattcgtgcctcaaagcgccatgaaatggcgtcccggcatcaaaagaattatggagtatttccacgagcgaactgaaggcagcggaatcgagcatcgccgctgctccctaacattccactacgacggtgcgctcgaccgcgaagtagccgctcgccaggcctccgagttagcctatcaaatcaacggtgcccgcggacgtgcggatttccacgtcgtccgcgaggcaacatcggtgaaggttgaaccgccgcatgttgctttcggaaatgggagagccgccacctatatcctagaccatctccctaatatcaagtatccggagtttctgttcgcagctggtggttctcgcagtgttgaggcgctgtttcgctgggcaaatgagttgggtgttgcccccgttgcttctcggtttgataattccgagcttgggaaaacactccatgtcaccaccgtgacaactagcacacatgctaccgaggcgagatcggtgttgccgtctgattcctcgcttttggctgttttgggtgaactgtcgagtttcacgtctaatggggaggatactgaatgacttactcgcaccgggtttgttgtggctggttactattttcattatgggactgcttgacttattatatagttttgcttgatgttcaagggggggatacacacatgcaatgcagtatagctttcaataactgatacatgctaagtagtcttgattatttagaccgacttttatatttcgagagcgtcgtttcaaatgatcaccctaatcgtctactttaaaggtaaagatacatttttattccttattctctgccacaattcatgcatagatcaaggggatcagcaatcataaaacggtagattggctctcacaactccaccaaccatagacccgattgttgaaaaaaatcagaaacaaagagagtgcaaatacagaacacagaatacgggtaggatatagcataagcaatgattaaaagaaaaaaacatgaatcataagaagcagcagctagcaaagcaaattggtcatttcatgccttgcgtgtcggagctgagaaaggggttaagaggccggagactctagggcttgtcctcctttgaggatgaggctccatcagtcgctgctgagataagggtgggtgccacacggcgcctcttcggcggctgctgcaacgcattatttggttcttccttgctaccttctctttcagactcgcttgcacgctttcccagaacgctactaccagtcgtagtggtcccattttgtggagcgcctgagataggcgtttgtggcggagttgtcattggaagagtcggtggctgcgcagagtttgttgccgtcacggacggaacagtcccgagagtgggagtaggattattcacgactcccgcaggggctggctgcgtggaaagctgtgtcgcgactgagcaggccgagttggaccgtgcgggactggctggcggtatgggtcctgtgctatttggaggggcatggctcgtcttgattggagatggcacatgtgaagacgccgaatgcgttggtgtcagcagaggtgtgagatttgtcgcaggggtggttgggtttgaaacattatgagtcacagaagttggtcctgtgtacgtttggcccagctccccaggggcgaacgagagtgaagagcagaacccatcagaggaactcatgatcaatgttaatccatcggccgacctgttgtgcgttagaaattgacacgtgggtatcaatcatagaaacagtacttaccaggtcaagtcagtaaaagtagcaaaatgcaaattgctgacgatacatagcggggtttgttgttgtgtgtcatataccaagacagcatcttgagtggcaacagcatatacaatgcgataaggaagtgcaaagacgggcgccgagctgtggtttgcttcattgccgccgtgctcggcagcctttggggatggctgaagctttgatgaatccgccgtcgttgaggatggagggactatgtggggttggctggtgaagggtggatttcccgataccacgggctctgggagggacgagaacatctcctcgcctgaagatgtatcaagggtgatgtttttcgcaggctgggtgccctgcttcaacgtgtaaaagaccggggagcatttgacggctacagatggcttcttgtgtcctggaaggtgagagatcgggggcttgttgaaaccagcccgtgtgtagacgtaaactgtgttgatgacctcgtctgtcgtctttgtagaatccgtagctgatacgtgactggttttgaattgaccagctggtgtaaacagcaggcttccgtcaggagcaaaggtcagtcgcctgaagaaagaagtaaacgtctcgttggcatagatactggcgttcttgacccccaggccaccaagacttggggatgagacttccaacggcttaacagcgggcaacgggagagatggagcaggagacgcggatcgccggatcgaaggagacgagccgaacgaagaacgccggctgtgtgagactggaggaggatccatgggtagattggaagccattggtgtccccggagtcgagggagcaggcgaggcaatagcaatggaatttgcagtgcttggttgagaccggctcgtcacgtctggaggcgcaggactgctagatgcgatacgtttggcagggagatccatcttgagcactttcccatgcggtgtcaatgtgaattgtccatccttagtcttcaatgtataaatatgaacggatcggtcggacgactgagtcgcgacaaactcgttaagcggatcccatgctacaccctgaacatagtgagaatgctcggcaatctgccgtaccatttgccctgtattcgatcgttagcctatcgcgttgtatgagaaccgttcgagggtaactaaccagtctgggcattgtaaatccgtgcgatgttgtccatgctgccagtaatgataaagacaccatcaggagaccaggccaggtcgtagatctcagcgccggacgagcgacacatgtgcttcactcgccaagtctctttatcgtccgaatgatcttcacccagagcttgcgtttgtatctccgatggtacccagagtaggacatttccatcgtctccggcagatgccagcatctcacctacatccgtcagacttgcagtcatatgctaacctggagaaaaacacacctttcgggctgaagcggaccacattgacggcttgtgtatgcttcatcagagtactcagataagagacttttctttcctccccggtagactcgactttccagagctgtagaacatgtcagatcaaggtatgcgaagggcgacggagggcgggttcatactcggacgttattgtcactaaaaaaaagtagtcagtaaaccgttcaacactctgagagaacagatagaacgtactttccagccgtagctaaccggcccttgccattgggatcgaaatgcaccgagtagataggggcattgtcattgtgccatgagatgagcaacggggtggccttcatggcgagcgccgcagctcagtgtgttaagcaccaccggttttcaagtaaggtgatatgacctggagagaaaagagagaatagaggatttccgagtccaatgatcaatcaggtatctttttttgccaggtgatatccggggtggttttgaattggagaagatccagttgatctaggtcaggtaagaagacggaggaggaagtgcaattcaaatatcaatgggaggaaataaaaaagatgcgacaaggggttggggacaaggggagagaaggttaagggaagagagtcgtgattcttcgatgatgcttcgagttgtttgcggagaacgcgaccgacggcaactgacaccgggagagggttttgttgacattgtccttttgtatatgtttttgtacgtattatatagcattttatagctattgggttattatatctattagaaatgtttatgatttgaatcggagtacggagaagtagatatccagccctagaggtaagcactaggagcagcatttgaaacagatatcaaagttagaggaacgtgaacgtaatcagtctcaaagactatttattggtctatacggagtagaaaagagctaactatacaatgcaaagcaaccccaacgcctctccaagtcgccatttttcaaagcagaatagcaagtacaagcaccagactctacgacagccactttccgagtctctctccaaaccagcttacagctctctcctgtcgcttctgtcgagcatcctcttgagactttatgaagggcgcagcctcctccgcatacatcttgtgctgctcccgctgcgcgtagtgtgcccgaatttctaactctcgctcatggggtgtgagcttctctaatggcttggacggtttgagctctgctgggattggctctcctccaggaatctcaaggccgacttccggggtttgcgatggcttatctgggttgaaaagcgacgtgataggcggtggcgcgattccagcggccttcgcatcgtcaactcgcttttcatagtctagcatctggtggtagagtttgtcgccatgcatttgaatacgctcttctttttcggcgtcatattcgaaactagatgcgtaaccgagtgcttggaggagtttctgtttaaggaaacatattagaatcgacatgatggagaaagctatgagttccagcaccaactcacagtctgggtcatgaagcatcgcgaaaaggtggcattctccgccgagcacatggtcagccgggcttcaatttgcttgcgccaatttccggtctggaagcagtatgtcagggcttcatgctccaaggcacagttctccattgctgctcgttgcactgtgtcgccgcgctctttgtacttttcaatcactcgtgatgccacgccgactccgggttgttcttcaaggtccatcggcggcttgtaggttttccacagataagcgtaacggccatctgggtagagtgatgctgcaggaactttgggcttcgagggatcggacggttcgggcgattgcgcgggcgtggagggcggcttcacattaggaccaggcacatatttgtcgggcttctcctgttcgaggtagtcacgaagcccgggatcgagcttttggacagtatcatttttgtcaccccagagccaacccatttggaaatacttgtcgagaataaccaagaatgtgcaatagctgaagagttgaagattgagaacgcggagaagtcggcacaaaaaaggatcggccccgatagccttggctccgaccgtctttactcctcaactaccaacacgacgcgtcttttcgacgccgttcctctaaaatggaagcctgtatgtgctgcggtgaagtgcttatctttgtgtgaaattgctaacaattgacagcgcgagaggagcggcagctaatgcgccagcgcggagctgcgtacgcgccttgtctataccccgcggaaccataacagaaactgacttgctcgtttaggacgcgcaaagcaagagaggtcaattttgggttctcatttggtagcccatcgctcggattatcagcgactgcaccacttgcgactgtccctgaagctcagaatccaccgcgaacacagaccacgccggacacaacaccacgaccgtcaaaagtatcgcaaccaggatcgcaagccccggcaattgagcgcacaccgggaagtgcgcgcaacaagctcccagaaaggccctcggcatatgacgtaccctcctcggacgatagacctgaacaaacgcgaagtaacaagaggagaaagatcagtatgctaaggaccaggctggtgtgctatgctaggaatatgcgctaatgattactaaggttctgctaacggatcagaagatactccttctcgttcgaatggcgggcgatctaggaatggcaatgcacagtctgttgatcacaatgatagcacagagtctcaaacaagccacatccaggaacacccagatacagatacacctcctccatcggaaattcccaaggaggtctctccacagcctctcgtcttacccattccggagaccttagtcgaaactcaacccccgatagaagaggggacctatggcgcggaaccaacaacatcagccgctgaagagcacctagcccaaggcacaacttcagtgtctagccctacggcgcctgcagtagctgcagaaccacaagcgccactttcatcgcctacgggccaggccgagcagcctgaaaacacaaagcaactacgcgagaaacgacatagcacaccacgggtcgaggaacgaatcgaaataatcaagacgaatcaacaggctaccccagaaactgcttctccaattgttcagacagatcaatctgcaacaaaagccttatcaccgcgtggtagcgccgccgaagctcttgaagctagccatgcgccgactattgagggtgatgttgacatgactgagcatgtttcaccacccaaagataatgtaccagaggaagacagccagacgtctcaattgtcttctacggagatgaaacaggctcagcagcatcaatctaccgcgaataagactccagaactgcacgttgaagcctctgtgcaggagccagcaaccgagacccgggatgagcccgcggtagcccaatttgagggagccccaaaggctaaacggcctcgtggaagacccttgctcaacaagaagaccattgaagcggtcgagactgagaagatctcacctggacctatactagatgtcgcggagtcctcttcggggccgggtcgcaaaccaacatcacaaaagaatgaccaaccggaacctgtggtagaacctgctgtgcccaagccacagcgtggtagacctgggaagaaagcgaagcgcgcagctgaaactgaccctgaaaccgagcctgaacctgcggcagcagaccaggcagaagcagagataaattctgcagccccccctgggaagaaatcgaaacgcatagctgaagctgaccccgagcctgaacctgaacctgtggcagcagaccagccagaggcagggccagaatctgtggcacctaaatctcgtggccgacccgggaaaaagaccaaacacatagccgaacctgagcccgagcccgaagcggaatcagcagtatccaagccccaacgtggcaggcctggaaagaaggctaatcatgcaacggagctggagcttgaatctgccacagaagagcagcccgagcccgaaatggattctgcagtacctaagactcaatgtggtaggcccggaaagaaggccaatcgtgcgatggagcctgagcccgagcgtgtggcagaagaccagccggagcctgaggcggaatctgcagcacccaagccacagcgcggcagacctgcaaagaaggctaagcttgcactggagcccgaacctgaaccccagacagaataccaacccgagcctgagcctacacaagaacagcctcgtcgcaagactcgagcgcctcgtggagaaacagtcccggtcaccgtttaccgtctcgccaatgtcaattctctaggtggcgcaacatctacggccgacgggtctggagatgaagaagaatccgccgatgaactcaccacgcatcagaaggccaagatacccaaccgcggcggtgtcaacccggccgatgtattgagccagatctgccgtgagactctagagaaaacactaaatacactcaaggatgggattgcgaacgaacaaaataccacgcgacgtgcggagtggtcgcgcaagagaaaagccgtcgaagtatttggctcggagcttgagagccgcctcatggacctaagcgggatactcgatagcaattttgtgcttggtgtgcaattgaagaagactaagcgggagatgatggatctacggagtcatctataccgggtccgccgagaacgcgagaacatagctttgcagatggatgcggtgcgcagcagacacattgaacaggagaaggccaactcggtgagaacgttccctaacagtcctgacgatagcattactaacaatagttcctagtcacgatccacgatcagcaattcccttcacagccttgaattggccctcgaccgcaacaagcaacgtgctgcttctgctgcggattcttctacagatctcgaatacatgctccgcaccgtcgccgacgtgagttcccgggctcctggagcacaaggcggtctcttaaatcaaatccgagcattcaacgcacagctcgaagccaccgttgatcgcctggagcgatgatgtcatttttttgttgtctttttattcatccgttatgataccaggaatcattttttgtgcaatgaatatagtccatggctgcgccagaggatggcgtttggcgatattttcacctgtacaactcccgatgtgatcgagtgcataggtagctccttcttgttactttcagctaccattgaatgtcagagagacggcgagaatctccaattcttgatgatctgctattctacatgatacacataggtgggcaactctacagtgtattattaattgcacccctgtcgggcagtggtgccaccgggacaataacaaatcagacatgcccacttgctcctatcgcgactagtgagagtgagacttgctcgatctcatgttcaaagacgttatggtctcggacacttaaatttattgcttgttaatccaagtggagacccttggaagttctgcgaagcaagggaatactgatacttcgatcaaatgcaagatataaaaccacggccattcacccaaaatgtattctaacccccagttgaaatcaaatacaatatatacaatatatatcctaaaatgaccaaactcttcactcccctccacgtcggccgcatggagctcgccaaccgcatcgccatggcacccatgacccgctaccgtgcctccgacaaccacgtccccctccccatcatgaaagactactacgcccagcgcgcgtccgtcccaggcacgctattaataaccgaagccaccacgatctccgcccgggccggcgggtacgccaacgcacccggcatctacaacgacgcgcagatcgcagcctggaaagaagtcacggacgccgtgcacgccaaaggcagctacatctacgtccagctgtgggcggtaggccggccagccaacccgcagctcctacaagcggagggcggatacgatctcgtctcgagtagcgcgacggccgtgagcgcggacgcgcccacaccgcgcgcgctctcggagaccgaaatctacgcctggatcgcggactatgcgcaggcggcgcgcaatgccgttgcggcgggctttgacggtgtggagattcacgccgcgaacgggtatttgattgatcagtttacgcaggatatctgcaatacgcgcacggatgcgtggggaggtagtgtgcagggtcgggcgaggttcgcgcttgaggtctcgcgcgctgttgttgaggccgttggtgctgatcgcacggggattcggtttagtccgtggagtacgttccaggggatgcgcatgaaggatccgaagccgcagtttgagtatctggcggtgcagacggctaagctgggacttgcttatgtgcatttggtggagtcgagaattgcggggggtgctgatgttgatgctacggatcggttggatttcttcctgcgggcttatgggaaggcttcgcctgttatttttgctggtgggtatgacgctgagtcggcggttcgggcggttgatgttgagtatgcggattatgatgctattgttggcattgggcggccgtttatttcgaacccggacttgccgttccgggttcagaatggcattccgtttgtgccatatgatagggccactttctatgtgcctaaggaccctaagggatacactgattatgcgttcagtgctgagttccagaaggccattgaggcggcggcttgatgtcctgattgtttagcgatggttgtgtaaatcattggatgtatagagctagacttataacagccctagaggacctagcatatatatattagtgcttgaacataatcaaattcactccaggctgtgttggtgccgagataccagattcccatttcttagagtaggttggctcaacatgagtctcctaatcaaaagcaaattgaaccttgcacgagtaccaacacgtgactttgcaaaacatgcgaacctgagccctcataaaaaaaaagcgggggaaatgcagtatatacaggaagcgtatgcaccttgtaagcagagctcggtagttagttactccgtattccgtgattatgttaaacctaaaggatttccccacaagccggttttaccaaaacgtgtgttcctccgacttggcacggagacaaacaccactttggaaaagccgagaaaatgttccggtccgccgagccgaaaaatccaagccgagggtaaatcgacacgttggtagcccataaccgtggattctacacgtattggggtaggtatgtaatggtttttgtgggggatcagatcagatgaacgaaaatgtggggaaaaagacgaacgccattcgccaagcaacatcgtatgttctatgagtaatgtatatcctgcactatggaagctcgtatttcgatgtgcagcactatgctctttagtcacgccaagtccccggggcatttgtatctcgaattagggggaggtagctgggctgaaattggtccggagcatccccatatggccaattattgatctgtgcatgatgacatggggaaaggttaaacgaggtggctattattggtcaggaagaatataagatgcccaggtgtatggtgccacctttgatagcagagtttgcgctcggatcaggtctggatcagaggaatggatcaaattaccaggaaacaggaagaattagcaatgattgcacagtttccactcatgtctcataaacaaaaaggcacgatccaacatgaagataagctataaactctttaagggggggaagttaaagggccacttggccaagaggattaacgtcgcattgacttatggagtacatacatagcaccctgcaggtaatctgtggcgtgtgtgtgttgttgtttattattattacttggcgtacgccacaactccaggctgttgcccggtatgtattagtgaagctgaaaaaaaaagaatccaggtccttggcacgatagcaacatggaagcaataagaaaaagatggctattattgtatactccatttgtacggagcacattagtcctgaatccagcggaaatctctgacccgggccgaatctcaagttggtacggcgtacgccgtacggagcacagaacctccgtatggagcacggctgatacgtccaccataattagccgtaaatcagtgtggagctgaagcttaactcgcttgcactttctacggggtactttctggcacatgacaagcttacgaaagaaaagaaaaataaagaagaggctcgagcgtactaggtagtacgccgatctaggttccccccggacaagggaacacgggaagagggcagactggttcggctatatctttatttaataggtcaacctggatatggcatattgtctattaccctgagacttgagaagcacaattcttaaactgaatgtgaatgacagcatgcgatgtctggtacatcatccgtggctagtgggtatgatatgtgtatcatgcttcggtctcaaaaaaggggcaagagggggcatattatgcgagacccgcgctaagtggagaacaatggatagaagagaggacaataatattaagaaagatacagagtatggtgtataacgaccacagcttaccaaggtgactatatcttactatgaattcattagtgcgtaacccctaagggtctactccgtacatccacggcgaatgcagaataatgattgaatcatataatccgtcacatgggcaacaattggtatgaggcaaaatacattccacaattataccgaggtcatgacgcagtctcggctcggtgtactcgataccgggatttaccaccggctcagccactatcagcaagtatctgctacctgttgcttgctttgatttccatttgcactaaagtactgtacatatgcacgatgtacggagtaaatcaatactctccatccggaatagagtggactggactctacatgatagaaagattaatatctccagagtccagtaaatttccgtctatacaactgctaccatgggacctacagcataagaattactggaacgcactccggatgctaacgtccacggggtacataagcttatggaattatgcatcaggtaagccaagcattggagtcaggcaagtcagcaaaccctcgtttattctccctccaatgataacttcgttccccggatatcccatctccccactttcttccccgggctagttcttccattcatccatggatccttacctgccaattacctaacctgtgaacggtcctccccccattcctccgtgccgtccctgcatggctgatttgatatagttcgttttttacccctgtgaagcgattcaaaacaataggagttggatagttatattctgtataattatatgagacattcccctcccatctcatctttttttcctcttttctccactttagcacactcgaccagactcttatcaaccgtggaaccggtccataagtggagccttaaaaacgggtctgcaaatcattgtaatattaccgaaataccaaaatacctggtaagtttggttccaccatcgcttcccagtttttttcaaatctgctttttttgcattcactccaattggagagagtataatagttctcttccccttccccagcttccttccccggtttcctttttcttccccagcttcattgttctatatctctagcccagcagtgctgtgcttcaatctcatatacccctatacctataacgtgtgatacggctttacataacggtctacctcttttaccttcctctttttaacgaatcagattcattatgtctgccactcaaacaatggaccatgccgcattggagaaggatgcgggtccctctcctccctctccccagatcagctctggccagaacggcgcccccatgcagcctcagatgtccgtcgaagagcaccaggtagcacaagcggccgcgcgcttcggctacggacccctggcccaagtcaacaacaacgaacgatccctgcctcccttcggtggtgagttccagcccggtctgtacaagcccgtcgaaggccgcaaattcgccaatccggctcctctcggcctgtgcgctttcgcccttactactttcgtcctgagcgccatcaacatgggcaccctggatatctccagccccaacattgtggtcggtcttgcttttgcttacggtggtcttgttcagctgctctctggcatgtggtatgtagcttccgtggcctcggcctgaggttcccctgacatgagatctgcgactaatacgcgcttctttactagggaaatggctgtcggaaacacctttggtgccaccgctctgtcctcctacggtggtttctggatcgcgttcgctatcgtcttgacccctggtgggttcgagattggtgaggctctcggcgagtcaagcagtgacccttccaagttctatgactccatgggtctcttcctgctggtaagtgttccttcttcacaagacatgtgcaagaaatcatcccgctgacaatgtaacagggctggttcatcttcaccaccatcatgttgttctgcaccctcaagtccaccgtcgccttcttcatgctgttcttcaccctggacctgaccttcctcctgctcggcatcgcctacctgcagcgcagtcccgacggcagccccaacaccaacgtccagatggccggtggattcttcggcttcctggctgctttctcggcctggtacaacgccctggctggtcttgctgataacagcaacagtttcttcatcattcccgtcgctcacttcccctggtctcccactggccgtgttcgccgtggaaagaccgaccgcgagctcgcataagcgatttcctttttccttttttctcatcggaaaaacagccgggatgcgaagtgtccgctttggtgatttgtaatgttttttgatacccagcgttgtatgtgtaggcgatagactgagattccatccgccgcgttctcatcgagttgtcgattgtgttccggtttggaggcctgtctgttcgcctgtgactgttgtgtgcatggatgatcgatgattctgcactagtgcagttgcaaaaaaatcttttgtccgagtcgattgatgctgtttgtaatttttcgaggagcaccgaggtgatttcttgtgctttctgctttttttccttgctgtatttagtctcttttacctgcgagtttcttgtgactcagtaattaaatcatcgacattgttcacaataccttccttcatcttgtagattgttgtccttaggctactaggtgaagtcgaattcacaccagtgcttgctcttgtccgggttgtatcgcagacaggctgttgttgggcttgagacattgtatatcctcatcagatagtaacattctgcgcaagaaaacacctgccaccaatcatccaagcatgtctggctagtcaagcaccccgacctaggaaggccaagaggctgacaagccgtccatagcctagtataagattcatgtaaggatatacattgaaggtgaacgaggattgaagacaaaatcccaatatcctatagtatgggccaaaaaaaagtttgtttcaacagacgggagaatgaaacaggggaaaaaggtgccagggggacacgggagtatatagataccgccgaaatgagtcttttagggcctatttacctcggacctctccctctcatgcccagggatcaagccacccgagagtggagatgtctgatatcattcggaaatttctcggtctgcacgacttgccaccttgaagttgacaataagcataagccaagaatgtaggattctaattcacaccggttgacgcaactacatcagatcatgtatagatatgtcgcataacattctcctacatacctccttttcgcaggaagtatacgtacatctggttggaatcggttggaatcgcgagaaaaaaaaaaggtacgcaataaagcgggaaatgaaatgatatcgggaaaaaaaaaatcacgcaaccaaagccacaaagggccaagcaatctaggaagagctgcctttctatattgtatcgaaaatcgcgcatcgccgagtctaagccgatctttgcccggctgaagttcggtgcacgttcggcgggcggtttctacagcgtatcagcttcgtcgagcctagggagtgccggagatttttcggatttcgggatgccgaggttgggtttgtggactgatgggcggtttcaacgccgggaatggatgtagtatgtcgggtttgatcggaattgtgtgcttggcttggcttggtggcttggctgttttgaggttgggaggatatatgagctggagggattgggtaggaacaaacctggcatagcatgtacatttagttccagggttgaagaagtggtcaattaggtacggagtagtagatagatgggctgtagctgtttggagaggagtagtcgtgaatcattggaaatagaatatatacattatatcttcactcatgcgtagatagcgagaagtccggagcctggaatatactggatggaagcggttgtatataaccgacttggatgggttcgatctattacggcagagccatgtagccaggttcatactggcgattctaccagcagttgacactcatcccagatctgacgaagcataggcaggtgaatgcgatcgacatagaaaaagcccagcaagatagaacgggcctcctgccaagagtggattccctgcagccgtgcagcattggccagttcagatacaaaaaaggcccgctctgacggcagggttagactgcaagccgcgcccatgaaaagctgccagaggagcaggtcgcgacagagcgcgaataagcctgacgggatggtcgcctcgagggcaatgcgcagagcctggattggcttgggcagtaactggccgatcattggatagaagttccagatagcgctgttgtggaatagcagtaaagcgagacgggtgcagccctcgatggagttgtcgccctttacttggcctgtcatggtgtatcgatctgtgtgtagttggtattctacgtgcagcacttctgtgttgaaatagtcctcggtctcctcgttaaactctttgtagccggtgttgcctttgatccattctgcataccaggatagttcgaggagatcatatacgatctgtgccatgggttcgccgaagatgcctggtattttgagtagagggaaaaggcgggtggaaagtaatgctacgtcgtcgttgggtggaatgagagagagtcgcgctgggcgagtgtagcggacaaaggggaatataggcttggcgtgagccatgcaagcaactcggatatcagtcctaattgcgaggttagcaagccttgcagctaatcatgaaggaggatacgaaccatgagatctggaaccgcacgtctgaagggacatcgtcaaagttcttccgtagtgcgatcatctgtcgcaaacctgcaagatggattttgaggtaatcgggattccccgacgcgatctacaatcatgtataagctttagtaatcgcaagcttggtgcgcagaatatactcacttcaattgtcaacaaggtagaaactgcagcaatcagaacatcgctagaagccttgaccgggtctgacaggccctcgttgaccagccgaatagtctcgccacggtggtggaacgtgtcgatcaccaactgactccgcttttgattcggatctcggatgggtagctcgcctgcacgcatagcatcattggaagtagccatgcaaattgtcgcatgcagaatggccgggtcgcgttggatcaaggacgcccaatgagcctgcaacttgggtttataccgcgtttgcaatggatgcgcttcttgtgtcagatcccagaggactatacccgtgtcagtatacgagctcgaccatatcaggatcggggtgtaaacactcacagactcgcaaatgtcgcatcattctatctgtgagatgtgtatgtccagtatgaaaaggatcattagctccctgtcccaggtaagaccatgcagagggataggccaccgccccaccaaagccagagtcattccatgatgcggcttgcatagcagggtatcccacggctgttgatgtcacaagctcctcgacctgttctagctcttgttcatctgagatttgactgctagacaagttgacagacgaaccaatacacgaaccgacaggcccagcggtatccagtgccccggtgttcgtcgtcgtcgtcggctgacaaggcgagttcttccatttgcttttattggactgctccccgttccccattcgcttcttgcgattatgttcggacatgacatgggaccgaatccgcttcaaggtctcatccgttgtgcctgccgctgccgtttgttgatcactgttgacccagaacaaagtcgatttccccgtagatgcattgtcggctttgcggggtttgcgtactctggtggttgttttccgactagacgccttgggtgggggaggagctggtgcaggagctggtgtaggagctggtgttgaggccatggtctgtatagggtgtatattgggatcgaagtggatgggagctgcatagggggagtggatcggatcggccgcccaagccgcagccgatggccgagacagcacgggcaaggtctgctcgtaacccggtaaaaggtccttggcatccatcgagcttaattagacgttcgaggcattacctatgtaggaggagggagacctggaggttaagaggaggacaaacttcctttccggaccggcggggtagaaatcacaggaattttggattcttcacattgcagaacgaatcactggccccgctaagagttctagtggaaattgacaggtttgatttagatgatttaaggggtttagaggatttaaaggatttagggggatttacgattcgtttgtttgttcttttccgcccctttcgaggactacaagtctacaccagtcgcatgttccaatatccacttgaccttgagaatatgggggtatattcaccgagcttgttctttttaaggtcatgtggcgttgaaaaagagtaataacacatgtgtatgtaggtacagggggaacctcgatatcgtgatctactatgatcagcacaaattcatgaaacacgttgagatacacggagacaagccgacgaagtgtgtatagatctgcattttggcccctgaaaaacatccaacggtttagacgtcaagtcaagattttctgcccctgacagcactagccttacatttgttaaagtgggcatcgcatagcccgagatgaagttcaattgctttattggagtacagaatgcattaatattggatccgagggagctccccaaggtatgtagttacttgtaatagtatcgaagagctagctgtacaacggaaatatccgtggtctactcgatgtggaggcgatgtggggagcaagtgagatagaacgaatgagatagtcaagtgaagataatcatacaacggacgtcggtttcattccgacgccgtgcagatcgtgttgcgcccccaaatttaggtcataccggggcgcgggaagatcggcatcgtgtccagctgttctaacccacccattgtaccactctgcccactgttttgccaaccttgtccggtctgctgattgataaactggctctgtcggaaagggttggtgctgccagttgggttaggccgcaagggagctgctgctggaggctgcagaccttgctgcggagcaggagaggctcgcgcaaaaggattggttcccgtccgctgaggctggatcggctgcgcttgtggtggctgaagcggtacttgcgggggttgtacaggctgaaattgctcgtttgagggattatattgcgtgtttgctgtggatagtcgtctcgcgaaggggttcgtgttctgtcgcgatagaggagcggcgggtggctgagcacctgtatgagagttgagcatcattgactggcggaacgggttcgtgtgctggggttgcaagggctgaagtgcttgctgctgttgctgttgctgttgctgttgtgggaaggcggcaatgccttcctgcggaataggagctaattgcgactggaagccatatgaatgcggctgtggagagtaccctccaaatccagcgccagttggcatagcttgaagcggctgcggcggcggtggctgttgttgttgtagttgctgcggctgcccaaatggattatttgggccctgtgcttgataaggcactccatattgggtcggctggccatatccagttgccaagggctgctgctgaatcgcctgaggctgctgctggaagccagtctgctggggatagaaaggttgctgcggttgctgttggaaccctgtttgctggtattgcattgagttctgttgccccattggctgcgggtcaattgaatcaaaaaagtcgatcagatccacagctggcggcttcggttgttcggcctgcttgggtgtgtttgacgccggcgggtttgacactgggttcggcgcgggctttgatacatctgtggtcgcactggcttccatgctcggtggaacgcgaacgcctttcttggccagatactcccgccggcgaagatcgaaatcaggatcgttgagatcatcttcgagaaggcgcgccaaatctgtggaggcatgtttgagcttcggaatttccaagcgagtagcagactcgaaatgtcttgcgactcccaaaaactggaccacttcttccgtttgttttgtgaatgtcttgtagattgccaaggcgcgtacactatccggccgcgacatctcaaagtagtgttctatttcggggttaaaccaatgccgatcaatggaggagctgctgacttacctaaaacattaatcgtaccctcattcatgactgaatatagagtcaatagatcaagtgtgaggagacggaacgcggtcagactgatctcgttctcgggctcatccgtcaacaactgtacactgtcagtcaccaataaaaggcctgaattcggaattcacccacatcacatcgcagtaacgcacgaatttgcttctgtacgatttccgtctccctcaaaaggcctttatccacacctatcctcttcagccgtcccggtccgcttcgtacatggtccgtcttgcaggcttcgaacgccttggcacgcgtgataaggtattcggcatatcgtcggatattatgcccttgtgattgggctataagaacagtcagtagactgcaatcacatcaatatgagggaactactggtctaaccttcagagaaattgctgggcgtgatcttcttcgggttatcggacaggtatcccagcgcagcatcaagttgaccctctcggatcataagatggagcacgatgagtgccttgaaaacaatggtccatgccgagtctcgaagccgtatttggagggttcgaaatacctctgcgactcctgcctcgccggtatgagttgccacaagaatattctctatgtatttggatttaggggccgcaagctgttcacgtcagatatttaataattgtcgcatgtagaaaaaagaatgagctgagaattcggactgaccttgagcttcgtagccccctttactgacttctcaaatccccccggcatgttgttcttataagtcgcgaatcggcgcccactttggctcaggagaatagaagtctgttagaagacagtgggaaagactggagagcctgctccgagaatcaatgcccttatagtgtccgggtgagtcctcaatcatccgtatcgttcatgacgtggctcattgagccatgctgtgagcctggggcaagtgggcaattttctaggggatagggttcgaagtccgatcggaacggccgggttaaggattggcgagaatttgagatcactgagtgaatatgggctgagaagcaaattgagggataaggatagcaaataagataatcccaagggtgagggcaaagggagttcctgggggcggagtgcatgttcctcgaggcaacctaaattgggactagcgcatgttggcagttcctcgtgcagattagccctggagtatacgagtactatatcataacgaactggtatttagattatatatgaaagattataggctatataaactataattggatgaccatatcttggatatatccgttgatcgtaatatttgaatattgcgatttcgttcctatatctagagattatatatcacggtatccttgggtttatttgaaaacatttcgatgtagactgtggcatatcttgtattagacgatataatataatagatagctagtgaccgtaagccagccaaggagttatcattaacacagagggaacctgctttgcacaattggggaaaacaccacgaagcaacctttttgttggctttttaagatcgaattgaatgaagagaggaaagagtagatatataacatccatttcggaatacagcccactaggcaagtaaaagactactggtatttgacgtagatctagggcttcatacttgaactaaagaactatacaatactccacttatggatcatgctagaaccaagctagtcacaaaataagaatcaaggtctgaacgaccttgattctatcaattatctggccagagaagcagttatcttgtacgtagttgcctcaaacgtccgagatgggcaaaaatgtacctagaatagtgagatcttcaacttctaccttatcccaatatgttaaaggaccagatctacttttgggctgaagataggttctctatttgctagcatctttgaagaagatttagtcacatatgagaccgaagatatgtccattcccagaatgttcgagggacgggctggttattcaagtctgagccccaagagtaatttatcgtttgttatacccttctcttacttttcttcccctacccttctgactctcatccttcaaccacccctaaccccgcagacaccccaccctatgccattttcactgtcccagcgaatagcagatgaaatcaccatgatgagtctcagccgcagtcggaaacgaaccgaccagcttgaaaacaacgagtcggttgttaccagccatggaaagatctgcctctggtgtaaccgtgaattgattatcgacggaacagatggtcgtgatgaccagagccagcccactcgtcccaaccaagccataatctccaatcaaaaccaacagttccaacatagacaccaagagcaccaagaccaggaccagcaggaccatcaagaatgccaagagcctcaatatcaacatcaagatcagcaaggttgcggacagcagcatcatggcagacaaggccatcacattgaccatgagctggctatgcaaggagttccggccgataaaatgccaccattgctgtttcggtggtcaaaccgtgactcccaaggaatcaactcgaagaccatgtttgtagccgggcttttctgcaacggtgattggtttgactccgaagactgctccggggaccgtttcgagggcttctttcggagccatgtaagtaaacagaaagtcagaacccccttcatctctaccttccgatcaccattggcaccacttcaccgtgccattgctggccagaatggcgccatagtgaccgttattgacacgtccaagttggagaccaaagtcttctatgcccatccgctggctattcggaccgggacgcttgtgtacaatggctggcagggctacggggagtacctcatctggggtcgcgtcccagctgaggcaatcgctttcagcgtggatatcgtcagtcttgagggcatcacacagtcacaccgtgatttgaaccgcttggttcagatcccccttatccgcagctctctacgctgcagtgatactcttcgtgacatgctggcgttgaggagaaagtcgcccttccaatctggtagaacgctcggaaagtttttgacccttctccaagtgccaaggatccactgggcgaacttagcatctgagttcgccagggcatggggttggaggaatgcgagagagacaaaaatattttacagcggagtgaaaagtgcacctccttacctgcccgaggaattgacggactctgagagtgaggctccatggcccacacctcgaaagacgccttggcagaccccccaaaagatgcacttctcacccgactgtgttcccgacttagactacgaaccacccgagaccgacgaaaggtcggaagggacctctgagtcggaaggtgtgtccagttctcaaactatgtcaatgtgcgacaagacagagaccgcggatgatgggaacttttcaacacatgagacgctgtctagtggaatcttcccggagaacaatggttccgaagacttcttggcgcatatacatagtcaagaggcaattgacttaacctctgataatgaagatactagttcccagcgcgcattgcagcgggactggccgtcagatgacgatacatacatgtatcctgacacgcccaccaaaatccgagggaagatctcactgcactcggacaataaagccacctaccgccctgtactcaatggacagatggacatggacttttttgaaaagttccggctttggacttagcgtacaaactgacgatatgtgaaggtcacgaagaatccatgcttggcatggaagagaacattgaagaatctttgtttggcgcagctatctgaagacgagaaaaactagtaactagtcaatgtgtcaatttgcctttgtgatatagaataaacctcctggcaatgctgtctctaatatgtgcattgcgaacaaagtaaataattggcatattcatgatcctacctccttcgatatctaggcaagtaggtattatgcaactaactagtaatataaccatatatgcccgaaataatatcaaaactacgcatacagacagccaaacgacaacccatgccctagataggtatgtgatttgccattactagagaacacagattaaggtcctactggatcaatgtagacttggaagagcaaggagatgactcgagatgcgcattgagaggctttgtctagattgccatttatggtcaatcttgccctgtgccggagttggtgtacagtttccatcgcaggaggaccgaacaaatcattttgatttttgcgtggatacacgttcatgtgcgaggtatctgggacatggaaactcataaactatcccgacccccatccaagaacttcctgtatatccagtccataccgcttccttcgccttcaaaacacccggtttattaacctagaacttggagaaagacttgacagcgcgcgaggtcttggcgtgaaccttcaacacgttgaagcgaacctagagagaaattttagtcagtcgtcatgtccgtagcaaacaaagtaagctgtcaggttcgatgtcctgcagtaatgcaatagtgtgtggttttgccaacaatgacggaaattgacaaggatcactagatgaacgtacagtcttgctgagaggacggcactggccaacggtaacaaggtcaccctcctcaacacggaaagcgggggagacgtgggcagacaggttcttgtggcgacgctcgtaacggttgtacttggggacgtagtgcaggtattcgcggcggatgacgagggtacggtgcatcttggtggagactgtagataatcagttagcaagtccccctgcctggtgaaaaaaagacagttccaattcaacttaccgactttgccgacgaggacacggccgcggatggacacctgggaagtgaaggggcacttcttgtctgtaaaggttcaaaaatgagtaatctgacacggaaagattttggtgattgcggggatttttttttggcatgagtggtcttttcgtgattcgagagtttgagtgatgaatgcgaatattggcgagagagggaaacgacggagattccaggcccctcaattgctccatgcgatcctccattcgtcctttgtatccatgaaaagaccacccacccatatatatcccgccacaatatttcgaataaaaattcaacggaggtcgtgcataccgatgtagcttccctcaatggcggtcttgggggtacggaaaccgagaccgacatccttgtaccagcggcggccctgggcagtcttcttggacgaagccttagccttggtgttgaggaagatgtgaggctgcttctggaaagcgcgctccgactggacggtcaactcggtggccatttttgcggtgttgttcgacgaggaagcggtgtcgaggaaatgtcgggttggcggctgtcgaagatgaggaagattcgttgtccgttggaatctttggtaattcgtagtgtgcgacactagtcctaatcgggactaggctaattggggttagggctctgcgcttttgtttacatcacgtgattgcggaggcaacgcgctttgggcaggtgcgataggagtagattacaggctcacctgggcagtcctgtttgatctaaagatcccgacgctcagatttaccgagtatgcaaccttgaattgatctgtgaatgtgccgattcgctcgccgacaatgtcaactcgacccgactccgcggctttgcggccgccgcgatctcgtcggtctatcgctcatgtcccgcggtctaggatgacgtctagtttggacaaggagaatgcgacaactcagattggcgcagctcagccattcttgaataacacaaagcctgctatgaaagacaagaagtctcggagcaagagtttggggcctggtggactagatgccctccagaattctaacggcaatcgtcgccaggtagctatcaaacggaagaccacgggcgcatatgcagaacaattctgacttaaaatatctatagtctacagcttcttttccactaaagtctattctcaaacccacagtccctgtgtctccagtgcgaaccattccgtcattcgaggaaacgcgccgacgtacaccagctcgtagtaaacagcagacacacgacggcacgatggacggacagggccaaacagaccaaaagaaagagggtcttttgattgacttcgaaacaacaccaggacctcccacgacagataatgacaatgacgacacggcgaacccgtttgatacatttaatgcgacttctgccattcgcgaggagatggctgctactaaggagcgtgacgaacaggagcggaaagatcgagaacggcagaatatcttagagaaacgagccgcgcggaggaaatcaatgggtcagtgtgttccactttgtcatagaagtgaatattgacacagatttatacagcgaatcgccgagtatcctttgcccccgaggcaaccttacatacctggaacgtggtggaaattccggacgactcaacctcctcctctgccgcaaactcaacaagacgcgcatctgctgccgtaagctctcagaaccaacctgcccctgcctcgcccaccaaagacgctccatcttcgccagcagaatcggaattcgaattctcacctgtccgcacacaagatctaaaccagataagaggtcgcccatcatctggggatgatgacgttcaggatttgtcttctagtccgttcagcggaagctcagtaggaagcgaagacaccggcgcccaaagtctggccggagaagatgacgatggcgattcttcagactccgacgatggatttgatgctgagagcactgcaatgagcatggatgatatgaccgcgcgctcaggcatgagtgtccaatcagatgcaacttctagctcaagctctagtgccaggctcaacgaagcactacgtcaggccgcacaggaagcaggaaccgaacttgatgagggcggagagatgtcaatggaaattgtggatcaagaaataaccggtgcttttcagccgtggatcaaaaagggccaaaggcaaagctttgactggggagatattagcgcacgacatgatgaggagaacctcgatccatccaaggcggccactactcaaggttcaccagaatcagatgatatcgacgaggacgaagaccttagcatggacgtgacgaatgccgtaggacgcattcttggcaagtcccccggccgtcgccagagcacggctcgtcgccagtccgtggcagaagaatccaactatggagatcaaactatggagatgaccaatgtcgtcggtggcatcgcgcaggtggattcgccattcaacttttccgagattggcaacgaagatgaaggaatgacaatggaattcacatcagccgtcggcaaaatattgggcaaccagcctacttatgcctccaactctgatcacatgaacttcgatcaagagaatgagtctgacgatggtatggacatggagatgactggtgcaattggtggcatcctacagtcagggatcgaagccaatgacaaagtgcacgcgaagatgataatggagcttgaaaccgattcgggtcagcttgctagctcgccttttcaagacaatgttcgacagtctcctgccaaatcacccctggcttatcagattgctgctgttgcatctgaaaatgggagccccagttcggcaactatgcggcctaggcctcctcggcgtagctccaccccaggatcgtccagccggcaaagatcaccaaatacgaagccattgactccgcccaaacagtctaccccacaagctaaacctaccactccaagcaagacacccccctccagcaatgtcacatttagaagtgcttcgccaaagaagctcttccaacccgaactccagcaatcagcagataagcgcaagtctctacgccaaagcctgtttgagcataacatagcaacaggagagtcgaccccgctcttcaaattgcaaccacgcgagagtcgtcgctcttccggtctagggattgacaaagaaggtctcggatctcctcgcgtggcggccttactggacaagcgcccgtcgcttggggatagtacgccccagttcgttccgcaagaacagccccgatccggtgtacgcttcgaggatcctctgcaaatgcaggccgaggaagaacgtgatcgcgaagaagaggaactccgagaggatggctatatcaggggattgcagtcagatcgggacgtaaccccaagcttgaaggacttgatttcaaacctgagcccgaagaagactaggattggcaatcgtaagagtctccatgttggggctgctcgcggggttttgggcaagcgcccggtcgagctagacttggatgaagacgaagtggagaattcgcccaagcgactgcgtggccataatgtcagcccagtcaaaggtgtcaagttgccaacgccgatgttcagggaagccaatatccgtcggtcaattctgtcacccgtccgtagagctgctagctcatcaccccccaaaggcagcaccacgccttcccaacaaccacggagttcttcccaaacgtccacaactcctctcaatcatgggattgatgctcttcatattgcttctgatccccaacaaccagaagaagaagaggtcactcctaccgaagaagcccccgtggaaattgagtctattcagctgcaggacttcctgaaaatgaccaatattcatttcatggaactaactacgacaaagagaagacacacaactgcccccgggagtgccaccaagaagctgacacgaccttctggtgagagcatgcctaaaccaggctcgataacgtttgatgattgtgtggcagctggcttttgtaccgtgccaatgcttgaattataccagcatgtaagtgatactataccctgatactcttgttctcgctcacactgtctctagtcgtgtcgggagttgaagtcctatatttctgaaggtcggcaagtgattcgctctattgaggcagaaacatatgccgaaaatccagctctcttcaaagagtatatcaccgctcctccagatatccgagtgatcatggacaatcagttccgaaacgtcaaaacacatgcccgtctgctgagtaaggccacatggtacgaatggcggatgaagttgcttgaggggttgaaggaagggctcattcgccacgtggaggaaatgaaagcagatgacgatctgctatctgaacgagaagagttgcttaataggaacgtgccgtttctcgtggagaagcacgcctccctggaggaagaagcaaccaacctgaaacagttggtggaagagatggaaaactgtgatcaagatgagttgcgcaatacgcgcagcaagctgtccgaggtggactccgagattgcagtcaagagacgtgaacttgagcagttgcagaaggaagtccaggccaaggggactttcatcgaggctggagccgaaatgcgggatgagttcctggctcaaatccaggaggcagagcgtgtcaaagaagagtgccgtggctggagtgctcgggagatcaacgaactgaagggtgagctttccctatggagtttctttttttgtggctgcaatactgactgggaaaactagcctccgtccaacgaattcagcaacaaactggctggtcgatcgtttcggccgcaattccttcggatgatgcatcgaagggacctttattgaagatggcttatcgggataagctccaactagagttctatcccggggcttttgcctccaagaaaagtggccaggacgagggaaagaactacccgatggaactggcttcccagaagaatgccaacatttctcctattgcatccttggtcctccactcgttgcagcactacctggctactatccagcaatccactgtcgcacctaagcagcttttgcgcttcatctctagcgcatgggaccgcacagttgggctggaaaatgaggcgcgcatgctggaattctgtggtgttacccgcctcaccctgtccaagcctgatgtgggctctctttctctacgcacacgctgtacgctcctcggtaacgctaccgtatccacacctggccgtaaaggcattgcctcgaagaacaatggtgccaagagaatcgatgttgacttcactgtccgtacccgcatcgataaagccaatgcagagaacactatcggttccttggactttgatattgacgtcctggcgacgaaggtctatgggttcggaccaggcagcaagtctggtcttccagacaaggagttgcaaagcattctcggcaaaggccttagtcgggaaaaggacggtgatgttcagctcggaaacggcttgtggtgcaaagcagtgcgcatactcacgggatctgtgttttagttctcatttatgatttggttattggatgggttagctctggatttggaaaggaaggcgcagaatgagtctttttcatgcccttcttgggttcaatggcgcggggaaatgggatatcttgacttcgggatctggctgggcgttattttttatacctagtctttcttttcatatccactgattgatcatttgttttctattacactactagtagctacatcaacactcgtgaactcttgctaatgcatatacaaacaagagagtagagaggttgtgtttacaacgataacgataacaacaaatcaaaatatcacaccccgatcaatcgacccttagaacaaccccaagaacccattaggccagaccggatccgccccctgattcggatcctccaggccttgttgcggcatataaccataccccagactttgaggatcgaacccaccagcttgagccgtttggccgtcaatagcaggcgcgccatagataaacgactcagccgatagaatcggcatggaaggatatgcatcgacaggctgagtgcccgttgggatagagggcggaaaactgtagtcagtcgggtagagacctgcgaagatatttccgccgtgggtccagtcgccggccacagggtactggaagaaatcggggattgagttggcggtactgctgaaggagtctggggagtcggtgggattgggagtcatgcctgatgaccctgggggttgggttgcggttgtgggatagtcttgggatagttgccaggatgggattgacggtgcgaaggtgttctcatttgcttcgtgaaggaatgtggttgagggtgagtatatattaggtgggttggcgagatatggggattgtatttgagtgttgtcgcccgggtctggcattgggctcatgggaacgacgtagccggaggaattgaccggtggaaggccttctaaggtgtcgggaatactgctgtccatcgtggtggggctggcggtgcttgatgctggataccgcggagctgtggtgggggtcattgttttgcggagggttgttggtcggcggtgctgcctttggtggtgtggtgctggctgtgtccgagatgtatgcctcttgcctcctggtggtttataatcttggtcttcgtcgtctggggcgcgggctcttttctcgtctttgtcgatagctactctggcgatgcgttcgagggtcgcactcattcgggccatgaaaccggcgtaattatttgatccttcacctgggggggtgagagttgcgaagaaggccgagaccatgttgagggattgaaggtctgctcgcacacttgaatcgcgggtatcccgcagaatatttgagaataatgttgatgctgccaggaagacgtagtataataatgacctaagacttgagtgtgagaaatgaagctgataagaagactgttgtacttaccaggtccatgcgatatctccccatggcatgttattgacaaccttcagggtatctcgggcagcctgtgcaccaatggctgccgattttaaggcatgtgctttgctgattgacttgacctgctctgattcctttctggctgttatcatgtagttaagaaatataggtacccgatgaatcatgatcacagcattgtgatagacgaaatgcagaccaatagaggcaaagccaaacaggaagtcacgttcagtatgttttattttcggcccagtgagagttggggatttgcgtttccattcttcaagctctgcatatagttctttaatcgtcttgtagatttcagcgggtgatttttctaatgccttaacggagtacaatcgactgtagatgtggctcttgatgagcgacatcagacagagctcgcggaagaatggaatgttgcttgcggtttcaccatgcttatcgccctccagttcttctggaagggggacatcgaaatcatcttgatgctgtgatggggcatttccaattcttaggcatgtactggaacattgggttagtacttgatacggcgtctgaatggacttctcttacctttggtcaatgacaaatgcaacccaaaaaacgcgccgtctctcctcttgctcagccggactaagttccggtcttggaatatctcgatgaagtcccattcggtgaccggagcgcatggctgcagtaatgagcggcagtgctgattgggttcccgcatttccccgaaggaagaacgcctttgcaaaattgttagatgcttccataggtgccaaagaaggaggagacgtaccatgctaagcaatgcctgtatactcagcagatcggtgcgtttcaaggctaattcagtgaagaccgacatcgcgtttttgaagtataactcggatttctccttgtctttttctgacttggagctactcgaggatcgatattcatatgccaggcagattaccatgttgatgttagcccagcgcgcagcatcatcacaggtttgctgtgtatattgccattcgaccattttcatgaatgacgattcaagatagataggaaatagacggttggccgtccggaagaaatctttgataagagagaatacctctgacctcgagggcaaaggtttaaaaaccttcgaggcaaacaaatcctgaaacacgtccggtcgccattgattccatggattttcatgacgggattcaggagatatcattcgcaaaaagctcacatcgcctgctttgctcttgatccattctatccctgttcgcgatagaattgacattgagcacgacgttcctatccgtgagttagtctggacggttttttttatcacatgggcggtactgtctatcttaccgaaatatcgagaatcatctctttggtccgtcggaaagatgggtgtaccttcgatgaacccaccctgtgagcgaagagacgctccgaaatttgattttggactggaagcagatgatatgctctgactaattggtccatcatcatcatcttcgtcggaaaagtcgtcatgactcatatcgctttcttgcaagatgcctgccgtcctcaacaacgactcaaccctgacaaggcggtctttcaaagacttgacatattcatcagtactgtgaaataattagccatgatcgacaaaaagccgatcgggacatggcaatggacatcgccgtacctttgctgattatcccgcttctcatgctgggcggggaagacacattgcgtattacggcgcatgcattgcacgcaagtcgaattcgacccttcaagctcacacttggtctttttgcgatgacacatctcacaagcctagatagacattatatcgccgttagcaacgctggattcccccttaaccggagtccgccgggatagtagaactcggaacgacaaacaagaccaaccctcaggtgctgtcctctccaaagcgcagaatccatgggcaatgcgttctgggaaggtgactgcttcattgccttggtggcggacggttgtggatgggagtcatgaacgtgcgtgccaagacttttcgaaaaagtcgcccgagcggaaatggcgaggactagcgggagatctttgttccttatttcgatctctcctgtttgatgtctactcataggcaaatgttcagaatctgaagggaaagagaaaataaaaggagatgaataatcaaggaccacggatttcgggactctcggattccgttcactttgtgttccggccaagtttgtgggatgttcattttacggagcacggagtacgtgtcatttgatgtcttttttttttagatatcttgcatctcggtgttataactgaaaggagcataaatgtagttcaaggttcccttaattgtgttcgaggtattcctaggatagttggcatgtgtcaaatagatctcatgcttatcctgtgagatcatcggtatctataagcgctatatgtaagccttcaaatattattatctagcttactagccgaaaagacactgccggagtagaagtacatcggtcacagttgggatcctcattgtaagagctttcaggaggttcgtcggagacttgttaacgatttgttcgtcaattgttctgtaggatatggtccactctatgtcgcagctgtcagaattaactggtcagtgccgaactaatggtaagtggtgagatctgactgggcctagagctgacacctgctgcagtcatcctagaccgagggctaggataggggtgaagtcggaattggtttgtcgtaatattgaggatctgaagggtggtgggagagcataaagaatggtgaagttggagagacaggggagatattcatatgttgatgagaagacgaactcgccgaactacctgtttgctagctagagataatcccctttggtagatatctttttatttgtattttttcctctcagcgttatagccaaaaaataattatttactagagaagtgccaataggagaaagtcgtacccaattctgacccttcacaccgtctttgggagtaacttaccacttgtcacatcaccacatctggcactatcaacctttttaatccttctgagaaacggacgcaaaatttcctggcatggctcctcgcaagacatagatatgttgtgtatttatacatatctcaccctgcatctcgagaaccgtgactgccgaggctaatactaccgcaagaaacagccgttatttcttgagcgcatcttgcacgacaacaattttctccatacatcctctgcattgaccctatgcgaccagaagacggagacatcaacggccagcacacaaaacccaacccaatgccggacttgtaaaccgccagctcgggtaagcttctgtccgctgatggcaagtctcgctatgtcggcagtgttcttgatgatgaagagggcgacctatgtgaagtatccgattccgaccaggatgatattggagctatgcaaatacctcaaacgggcattttgggtgtcctcgcagtacacacaatatctggggccgtactcggaagcacgcatagcatcaccgggtaacaccctggccatgaggaggcgtccaagctctggaatgcgtacgcacaaaacgtggagcctctgtgtaaggttcttcatcttccagctgtcgcgaaaatggtcgataccattttagagtaaccttccgtggcctccaagagcaacgaatgcctgatttgtcatggccgtgcagaggtgggatatttgtgcgcttgcagcaagaatcttcgatacaaccaacgctatctacggcagccctagcatgcaaaagtattgatggcaaatataagcttcattcctgtgggatgctatcgcatgtgtctattcaaatcacgaggaacttgtcgaaggcagaaaacccctatattcacaatcggtaagctaccaaggcctggcttgtgaatcccctaagtcagtcgtccccaaagccgactttcatcactgcgtgtacgaaccgaaagtaagcgagcagcgggagagcatggatgtaataggtggaaccactaagcttgcggatgatgcatcggatgcagttttcggcgacatggatgggacaggcctgtctttaaatggcggtctcgactcttcagattgggttttctgggatcagccgttttgagagaccagcctgggctcagtctacatcccctgtacgtacgttagtaaggtttgtccggagcgtccaatgatctcctaaaccatagatcaagtagctcccagcaatactcatgattcggctttcaactctaaaacaggaactactgagacagcgaccattcaatcaaacccaccaaacccctggaaacccaccaaacccctggaagcccataaagcccataaagcccataaagcccataaagcccataaagcccataaagcccataaagcccataaagcccataaagcccataaagcccataaagcccataaagcccataaagcccataaagcccataaagcccataaagcccataaagcccataaagcccataaagcccataaagcccataaagcccataaagcccataaagcccataaagcccataaagcccataaagcccataaagcccataaagcccataaagcccataaagcccgtaaagcccgtatacaaattagggtgaagatattggaacaaccacatcggtctatgtagaattcatacctcggcaagtcaggagtgatgacatagttcccatcgggaccggattacggaaggaccgacgcaccgtccaatcggacgaaatcactcttcgggccggcccgacacactctagtactgggtagtagtatccttcagtgcctggcccatctggcctttcactattgcctgaggttgaaaagataaactattcaaaaaagctctcagtctcgtttaactttgatatattcagagatacaactgctcgaataggagctgtgatagattcaaaataacagaaacgggggcgaaggagagagaaccaatgcaaatcccgatatctcgaaaagtaggaaaggagcaaagaagcaaagaagcaaagaagcaaacgaaactatcaacgatctccagcgtcatccaacattcagatcgtgacaggagaaaggcagcacgcgattttgaactgtcgaagtcgggtatgcaaaccctctcaagagtgagttcagcgacattttcccttagacgaagacgcctctccctgtgatgaggacgcctttctcgctcgaaccttttccatctcatccgtcaattgaaggcagtagctcataatcaccatagcaaaatgacgcatattgcttttgctttcaatgacccacggtccataatcttgcatggtgagaaaaggcagtgcagttcccctcgaaggacagagatctccttgtaggtatgcggggtattctggcgggtactgggcaagtgtcaaataaatatcgtcttcgtcctgtgagatcagcaggcgcctataagttctcgttagcatataaacattcaacggcatattattatctagcttaccggtcaagaagacacttccggaagttcgcatcagtcacgatccatgtcaccatctgtgctgcttcctgccataggacctcaggacgtgcgctccagcctcgtcgcgccgctatcacttcgatgatggcgaaggtttcgcggatatgggaaccttcaagataaacattggtgcaggcagtcatctcttgaccaccgagacacacagtgttagggaggaagtctatcgacagtccacaccggaacgttgattgtaagagtcctgaggaggttcatcagtgactcatgagctacctgctcgtcaatcgttctggagagtatggacattctgcatcctctacagctgtcagaattgagggcatggtgagagacagaagagagctgtattatgtgacgtgccaagtcttgcaaggatagaagagtgtatcaattcaaaataactaagatagagagagagaaagaagaagcaagttgcaaagtgggaagcggcggcctgcttatatggttgaccttagcaatcataacatattagtatagaggagacaaacacctagaactatttgtttgctagttagctatcatagggtgtggctaaacctgctaggcaacccacacgtatctttcaacgcaccctgttgactgacttggagattcacaagccaggccctgggagtttcactggactaggttattagtattatatttatttaagttcattgatgccgccgatttcgcaagtgatcgaacacatccgtacggtctctccagcccaactagttggcttatattgtagcgaaggaagagctccaccggtgctgtatcatcgtcctcgaagctccacagttgagaatactgtagaatcaaactttctccatcaaatgaagcttgaatgatccttccgtgctgttcgcccatataggagagaaccaataactatagataggtagagacaggggattaggaagactttggctataatccatggatgcgatgtgggttgcttactgggtggataggatatttccggaagggcctgtgggatgtccgaatgagcaccatgttcactatagctcttacttcatggagagtgagacactggtcggcatgatttgctggaacgtgtgcaatattttccataatcgcatgtggcatagggaagttttcgtcaccgccttcgaggagatccattatgcaccagtatgccccaaagtggtccccggaaagcggggggtcgttcatctttcttttcgccctgcttgatattcagcatatagactcaaattcctgaaaataatcactgtttactatctctcgcagtgtaagagaaccaaggccaataagagaagtgcatggcggccgtcccttccggcgagcccaatgctggcagtacatatagaactgtaattcccgggcatgggtaagtcacttctgcggccccgccagtgacatgagttcgtcataataatcccttgccaatctgagagggtcttgtacatttggacattctgtgaggacatctctcagaattgaatcaaagtctgggcggttattcagctttggaaggcagcctccttcctttggatatatttggaggactcgctccgggtaaggccgaaaaaaacatgggtgaaattgcagattaccggcatctgttatccccacttgagatgcttagattccgataccttgaagatctctaggggagagaaagatgaattcacagtcgttgactcgtctatagaggatttgtatgatatcgtgccgcctggttagggtttgtgcattcatccctacggggaaatggtgagatcatgagagtggaaagacagaggatgagaaatcatcaacgtgagatggagtgatgtatacacaaggcggtcaatgctggggtgtattctgccacgacactttggagtcactctctaccaacagcgaccatagggaggcagaaggataaaacccacaacgagacctcaagaatatggggcgatgatatgaagtggtatgacggatagaaggtagtatagaggctattcataagaaggccacctaggcaatattcttaccaaaatagttgctgaaactacatatcctcatccagtgaatatattttgctctcgggccttcattgacacatagtaatccttctgtaacagtggggagcaagaaattggagccggaaatagtacacatgtagtaatgatcaccgaattccatgactaaaatcgacaggatgcttcaccatgcacctaactagtatgttgtacgtgacccctaaaaccttgtgccttatgattttgtgggttgacaggtggatgtacctgatatgtctcaagtatacaggacctggtcatcttgggatatgaatgtcagttgatgtaaacatgatgccacagttatcccgatccatttcccgatttttactccgtatgtgaattaggaatgaccccttttcagaaggacttccctacacagactgagaggtgaacataagcttaaatcctccagtcactcgccatgtgtatatgtactgggaatcggggcaatcacattatacagacttacaaccaaccaggttggaaggctgacaaatgaagcaaatgcacccccgcagtagaagtcaataagaactcggtgttttgctagtttgcctaaaaaaagtctactgtcatctaagacctgaaacaatttcttcaccatgagacccgttacagttggaattgtgtcgatcggagacatgggcctcggcatggccaggctcctaaaagcccacgattaccgagttgtcacggtcgcagaaggaagaaggtacgaacaccggaggcgaaaaccaaagccgagaaactaacggccgctgttcggccagtgaacacacactggcacggatccattcagccggcatcgagatcctcccctcggaccaagcgctagtaatccaagccgactacgtattgtcaatcgtacctccgcggaatgcagtggcgacggcgggacgaatcgcagctgcgtgcgcactgccgtcgacgggcagtctccgggaggcggtggaggacgtagagaacccgccgaaacggtccaagctatactacctcgagctcaacgcagtccccgcccgactggcgtcggagatggcggcgcaattcgacgagccaaccacaacggacgggggccgagggtgccacttcctcgatggcggaatcattggtgcgccgccgtcccaaagcacgcaagacgggagctggaagaaacctagcgtggtgctgtctggattggtggatctggcccctgggtttgcgacactagccggggtgttgaatataaggcttgtctcatctcggattggcgccgcatccacgctcaaactatccttcgcggcgctgaccaaaggtctgaccgcgttgtctatcctgtccttctccactgcgcagagggagtcgatgttgccggagttgctggcgctgctggaggaatactccccacgcactgcggcgctcgccacgaatggggtgattggcatgagtcccaaggcataccggtgggaggatgaaatgcgtgggatcggggagatgtttgatgcggaaggcggatggaatggagtcggagccgatgtttatggaggttttgctgagatctatcggaccattgcggaagataccgtattaggcgaggaaagagtggagcaccgagtgcgaggtataacgattgaggacgccgcccagatcatagctcagaggaaaggtgcttgagttgtgggagtcggcaacatatgtcatagggacgatcgaatgtttctagacgacgcgggaggggatttcgggcccggttgccaaggtgttgattaccagtccgcgtcatctgtgatgcgctgaattgaaaagtggacgaatgatgttgaatatagaatacacttacgcactctgatacgattacatactcccacactgcatgtacctggagactccatatattctactccgtacttcgcctcaggtactggttccgaggcaagtggagatatcagtcttgtttttctccagaagagcttgatatttcgaatccggagaagctggatatatatatagatttatatctgatatcgtataactatcccttctataccccgtaactaaccactgatcgatctatactccgtacatccaaagcggtgaatgtccccacgaaccacaactcgcgatcacgacatttctccattctatcagatcatcgactagcatcgtttttcctggtctttctctttgccccccccctttttttaaaccaacggccttttattcctcttctcattcgctcaggtggaactcccgcggcatgcgacgatgaagtgacctttctttttcgagatcgtgtggccgagagctcaaccttcccggtcttttttcctctggtctctgctttctttttcttttttggggccttttcgtcgatatttaattggcaattcctttttagggtgattctgatttgcttcaaaaaatatcccggatctggggtgtctctaaacatcagaaagcccctcttcttcttctcccataaccctaaaggtccaagggggctgaacttcctttttatttcttttccctcttcaaccatgccgggggaacaaccacctctaccaggcccgggtcccgtcttcgacaaacttgagaacttcaattttttgatgtcgcgtcacgatccagcagccaagacccgacagtactcatttgacgctgatactgggctggtcccgtttggcaacgcgaatatggattatgaccagaccgaaggcatgggcggtctatctgtcagttcttatgagagtatagaagacgatcgcagctctctcgatctccgaggctatccctatcatggtacgtgtcaagcttttgagacttttgttgcccaacgttgcatttgttacgccatcgcgcctctgcgtctgagctttagtttggggcttgaaattccaagtctgaaaattgaagttggatgtcttttttctttgatgattttgtccctgttggtttttttttaaagaaagaaaaaaaagtcctggataaccaggttgaaacctcttcttcccctacacaatcatgttcaccaatttcatttcgagggcttaaaaaagaaaaaaaagaaaaaaggctgcagagcccaggatgtgagctgtgacatgcatcttccatctccaatggtggaaggagatcaccgtcggtggtccttaaatgcacgagcacgcaatcccgcaatgaaatgacaacggccagttgccagcttacgctgaactgcacatccccttgagacccttcttgagcttatatccttccggaatatgatttacacttcccgatccatggggctcactccctcggggttatatcgacttcgatcgcttactccatccataggccctgccggcgagaagtccatcaactatactcttccagagcacatgatgccctactcagcccattccatttacccaccagtcccatacgcgcccgacgagctcggccacgcacagggggccctcacgccgtccgatgtgtcctcgtccatctccccgcccaacggccagatgggaaacaccaagtacagcaccaccatctccggcgatcgcatcgccgccgccctcgatcaagaggagggcgtgcgcggtgccgcagaggaagatcgccgtcgtcgaaataccgccgccagcgctcgcttccgtcagaagaagaagcagcgcgagcagatcctcgaacgcaccgtgcgtgaaaccaccgagaagaacgcttccctcgaggctcgcgtcgcacagctcgagatggagaaccgttggttgaagaacctcctcacggagaagcacgacgccggttcttctcgtctgcctgctccggctaaggatagctcgaccctcgagctaaaaggtcctggcgccaataccagacaaaaacatattcagcccaaaaagaagggcgtcggcaccgaggagtgatgatccaaaatggaagaatgtgcttttttgttgtttgtttgcgttgttgttcgccgttctttgtatcatctcctcagcctactccgtacggtctcctctacaaggcgtccgtaccaaatcagcattctgtcttgttttgtttttttttttcgtctacttgctttgctatggtgtctacactcatctaccccttcattctggcagggtagatgagcgcagacaaaatgacgacgtcacgacccttctcttcttctcgtttgcccggatctcccgaccgtggcttcttcgacttctagggatggtctttgtttttgcacttcagatctggcaactttcgtttgatatttgaatccgctatcctctctctacgctcgccttcctgccatcgggctttatctttacaactcctgcccaggctctataccttctatacatcctctcaacccttcctatcctctttccatcagatcgtgtgctgcgaaggcatgtttcatttttctctctttccccggggtttacgggaaaggagatgagttggcggtgttgtggtccagactcggggaagtcaattctagtttttgctttatatggtactggtttttttatatttgatatcttttctcttttgattgctctgggacttgctttttttcctgtttctttggtttcctccgtccttgctagctatctgtggactggaatacaatctaaatccccccggggtttatcttttgctatacgaattatctctactccggagtccgtactccgtaacaactgttcttctatcggattctgcacatacgtaatcgcaaagacgcaaaagcaatggcgggtgacgtgctccagctggcgtgctatatcagagcgattgcctcacggagatccaatgccattggagaatcggatgtgctgtgtcagttttccggggtaagggtctccccacagcctacagggctgcactattcaggcgaactgcacgaacagccacacagacagcacttttttaaattagcctagccgtacggagtatacggaggtatactggatggagtaatataaattcctgcaaacaatccattagaacacccttgattaccctggactatcctaatcctcaaaaacacaaaaaaaagaaccaaaacaagccaacataagatggtattacatcgattaagtagaaacagggaattgaaataaggaaaaaggaacaaaacaaagaaaaaaaaagactagacaattcccaatcgcacttggatctcagagtgacatctccaaactccgtggagaagggaaaggggaaattagacccacgtccgatcaaaagcttggagaggtggacttccccccgaagcacgattcatagccgttagatcacgacatttcatgtgaaaaaaaaagagaaaaggcgtcaaaacgtcccaaagctgcatgacgtgattgatgtgcgtctgcttcgagaatagcacggaatcaataaaacaaaaacatatatgaaagatcaaaagcacaagggatgggggatgggaattgatttttgacaaaaggaacgtggagatgaggaccgaccggacagacgaataaatcatcgtgtccatgcatctgccctagaaatttcagccgtcagattcgtgatggaaacaaggtaacagtctttctctcgcccatctcttatgcggcaatagactcgcggtcctcttcgcggccgcgctcctcgccctcaatggtgctcacaccatcatcggcgtcttcgtagctggggtgctggtcggctggaagccaagagtcgcgatccccggccaagggctggtcctgtgcagacaaatcgacgccctcgcggttcttgctgaggttggagcggtggcgctgggagagggtgcgggagcgctgcgagagactagacttgaccacggccttggaggagacccagttggtgagggcatcctcgcagtcctggatgatggccttggaggcatcgtagccgtcgtaggcgttgcgggtctcgccaggagtgacgggggtgtcgtcgatcaggtcgaggaggtgcttgccgtaaccagcgacgatggccaccttctcgcagtgctcgcggagcgcatcaaactggtactggaacgcggccttgaccttctcgcgggtgatgttggacagctgggcctcggcgactagggactcggcttcggcgcggacgagctcctgctccaggacgacgatgcggggcgagttggggtccttgtacttcagcttggcgatctcatcggtgatcttctgcttgcctggagatcgaatttagttaaagctgaggagttgttcaacactgctgggagagtcttacggtctcggctgggctgtacggaagcttcgatgttgcggatgctcttaatggtgacacggtactggtcgtagcggtcaacgaacatatcctctagctcaccgatctcgtagatcagcacgccgagcttgtccgtcacatccgacacatcctcatcgcatgcttcaccccaaatggagagttgttgctatggcgaccgagtcagtttccaattcgttataacgcggatcgcgaactcagggtcatcaacatacagcgacttccatgcgctcccgggcgacgagctccatgctgcgcatggcgttcttctccatcttgacgagctgcgacagcttcttggcgagctcgggtccgaaggcaccggcggcattcttacggaaagcatgacctgattgtagatgttagtttagttcagttttcgcagcgatatctcctctctctcttgcgactggtggtctccaattcggctgtcgtttctcggaggcgggggaaagtcgatagcggcccgatcttgggcagccctccaacgcgacgaacaccctcggagatttccatcgaagccaatcgcaacaatgtctcaatcgcactcaccgattccgcctttccctagccatctcccggtcttggttgtggacactggtggtagtgggctctcaatctgcgaggcggtcgggatgcgcgactggcgcatggaataggtgcgatgcatcatatggctcggagaggaaagtgaagtatgggaagatggttgtagagaggtagagatgtaagattcttgttcctgtagaaaaagaaataagaaaaaagaaagactttcccgttgcgcagtagtgacgtgagcttaaagaggggaattctttttttttcttgtacgtacttgagctggatgtgacgagaaatataaactgcaaacggacaggggaggtatagtccttttcaatgaaaactggagaaaggtgaagttctcctggaagctctcgggatgtgacgtcgactatttctgcccaaggggaatggactgatcggggacgctttgggggctcgggattggccagacgagcgcgaaaactcgacgacgctaggacaataaagagcattcactgcataaaatcagcctctgccaactccttccagctattaatcggccgatcgcatcgcgttgcaaatttttccatttttttcaagtcttcacgatcacccgacgtcattgacttccaccctgatgtcatggagttatgaaaaggttgcattatatacgctgatactgctatatgctacaatccgacagtagctacaagtgcctggattcccttttcacggctttgagatcgaggaactgaaactgcatactgtatagagctataccattggtgccccagttccactcgctgatcgcggagatcgtggaacgcctgttcgtggggaaaacccatgtggtctcggattttaattccacccggggcacggttgtaccttgcaagagtaactgatgataatgacagaggtttgattcatagagctatggaagttgagaactcatgagacatcggttagaaatggcttttggcttgaagggacgcagtcactaatcggccaaggcgttcattcaagcagctttgcccggtcatctcctgatggtgaaggtttctcggttcttgacttttctgaggaaaattgtttcatcgtagtgtccctgcgagagatagaatctgagtactacgggatgaaacgtaggtggtctggaaagtctcttgagttgcgtaagaaggaaaaggaaactatccaagtgctgggagagcggagaggtcatgtgatctcgagcagcccgtaactataaatattagtacattggtaagtcgtgaggatagtgtgtatcataccaagtggtcgacaaaatgagccctcatttccagcttcaaaaagctgcactcgagctagtgacagcacatcccatatcaagaaacgaacgatagtacggaaatttccgattatacgttcatgttgtcgacttatcaagtaaagggagaccgtaccgaattgtcttataggtacaatccatggatatgacccatgggttcatctcgagcatttgaacgcttgacttatgcgtgcagaataacgcagacacacgctgaagcgctgccggagccatggcgtatttgcttctcgatgaatgcaagatcagcactatgataaacgaccacgcgatatcactgatcggccaagggattcggcctttggacaccggtctcatctccaactaattggagaccgagtttccttcttttttctgcgtcataacctgggaccacttccttagagatttggtgagtgatcgcggatatcaaaaacccgaagagaagcatatctgcactctcgaagatgttaagatccgtggccaacaagcaaatactcgaaacagttcagattatataaccagcggcatttgtattagctctgtggcgagagagtgtaggttaggagaggtatttgaggcgcatggttgtgggactaagacgaagactatcagtgagtgtgttttcaagctagtcgtatctgatcgtcatattctcaccttgaatgtcattaaatagatggagaagatatggtatagagaggtagaggttgtgtggagacgtggtagaagagaaagaagagtgaggggcaaggaagagcattttatattggttaggtgaacacgcttctcatgtattggatcacttccagctctatcgcaaaccgagaagtcaagctacccttcgtttgcttaaatataatatatatgcatcctgattcatcggtatcgagaaagacataagctggataacaagacttagatgctaacgaaacaagaagggatcaacagaagatagttgctatgatgatataattattatgaagctccctaaatagcttcatggagagacaaaggcctaaaagccacaaagggtcacagtttgtcaacctgcgggcaggaagacaggaaaagccccaatgcatcagtaggcatttctaaccttcgtgaactacccgtcgaagaggctattaccgttgggcgttggtcctcccaagacgaccagaccatatagaatgcagtgatattctgctatagtaactcttattatgaaaaaaatgagattgacaatcttatggaacaagctaaaaaaaaggtatagacactttagtcatcatatttcacaagtttcttggattcaggcgccactcgaatgagctttttgttgatgaattctccaattcccaattcagacaactccctgccaaagccggagttcttgacacctccaaatggtaactcgggaactgtcacaaagaatgaattgatgaaaaccatgcccgcctcaatcttatttgccacggcgcgagcatgttcgtgattctcgctaataacagacgaaccaaggccgaacttagttgcgttggccagttcgatggcagcatcatctgtatctaccgagaacaccatggagactggaccgaataattcctcataaaaaatggggttctccggagtgacgtctgtgatcatcgtagactcgatatagaagcccggccggtcaatacgattacccccaaagagtaccgtggctccatggcttttggctttatctatctgatccaaaagcaccttcatagcactttccgaggacagcggagagacagcagtgtgaggatccatagggtcaccggccacccgagagctgaaccgatgtctcatgccttcgataaagcgctctgtacgctccttgccaaccacgataaagcgcttgggcgcggagcagacttggccaagacaccagatacgtccagcgcaggcctccgcgattgcgaaatctaaatccgcatcctcgagcacgataaacgggtccgacccgcctaactcaaggatgacctttttcaggtttcgtccagcacattcggcgacgatcgaacccgcgcgctcgctgccggtaagtgttacaccacgcacgcggaagtcgtcgatgatcgtttcaatctgtgatctggtgcaaaagagattcgtccacgcgccctcaggcgcaccggcatcctcgaagagctgagaaaatgcgagcgcgcattgcggcacgcgtgccgcatgtttcagcaacaccacgtttccagccatcaattggggccccgcaacacgtgccaattgataatatgggaagttccatggctcgatggcgagaatgatgccgaacggttcgcaaatgacttcagaactagctccgtgctcgtgaatcgtggtacctttcaagaactcctcggcgttcgttgcataatatgtcaagatatcgaccgagagtgagacctcggctaaggcttgggtgtataatttacccatctccttggtgatgagtgtggccatgtgctctgatcggtcactcatgagccgcgcaacacggtgaagaacctccgacctttcagcgatagtacgccgtcgccaatcgtcggtgaagcattcttgtgctctatccagtgcattggacacctcctggtcggtagtatccttatacgattggaacagttcaccggttgccgggttgatggatttgtaatgggctggcttggacattgtcgaatactgatgaaacgttcaatgttgaggacagtataagatgataaaatgagtttctcgacagttcttcctccggatatttataccgcaacacagctgtcactcgatatagttatgaccggattagggccatcccgcgagtggatagagtttcatcattaaaacgtcagccattcatataacgtcattgactacgataacagagcttagctcatgagaagtaaacatcgcccggacagaattcggcgttctatcggattgttttacagtttgcactaatgtgtggttttaagctagtcgtattagatcatcatgatttcaagacatggcataaagatctagaagttgtgtagagacgtggtagaagagttaggagcaaacaaagcattttatactggtcaggcgaactcatggtctttaccagagccagccaggagggataccaaatgccatgataatagtgatggaagaaagctggtcttttaacactttgcagcagggacgtaatctatattaatagttccggtggtagtattgcttactcacattgtctccaaattacatatgtatgtcttcatacacgatttctgtacgtagattgaaggtaaatggtggagacgaatacctgtaattgggcaaatcgaaagatgctgccataaggatggcgccgatgatacagccgaagttggttatgaaagccaccttacgtcggctctagagatcaccaaggtagatagatatatgaatgcggaacaaagtgaagcaattaaatcataagcctcgtgtgtgtttaacgtgagggtcttttcttatggacccaaaatccagaggttctaatgcggtaaaaatggacggtgagatgtggcagaatgacccagccggcagaacacatatgcactaggcccaatctagctagatgatcgtgatccacgtgactgactttctatctcacacccaaacaaagcaaataggcaagccaataagccaataagagagcggctttgtgtagccttagaacttagaaccagtcgcttcgctctgcaacgactatctggaggccttagaccaccgagatcactagtatgattggcttaggggcagggctatccgtaagtgcgttgtggcgtggttttgcttttgccaggtcgatccaactactatcgagcttccctctccaggacgtagctacattacaacatttaaggttaaagcaatatattccttccaataaccgagaatgacgaggtggcaagtctaaatatcaaccaacttccggtagcggacatatgttgccgtgcgggaatctccgagtcctgagctcaatccgaggtggcgtgacgggtctttcgcttcttattcgtgccggccttgcctttagtagttgagccacctcttttgcctttactttgcgaaataggggcttctttctctccgtccttgttagctggctcgccatcccgcgaggtttcgcccgtctgagcttcctgacgtagtcgactaaatgccttttccatgcggctgggtccacctgtacgaacgcgaggcgcaaatgcacccgcgccctgaggaccttgcatgaaatgcgtgatattagactgtgttccttcctgttctcgccggttcatgtcgcgaataaccggcaccaggacttcatccgtacgctcttggctccagccaattgtcgtcatgaggaaggttcgtaacgcattcaaatcaggaacaccccattggaactgggaagggtcgtcgtcaaccgcgggttccaggtatgcctcgtcaactttagcatcagggaatgaaggaggtaagaatatcttggatgccttctttcgaaatttcttccggaaggcaaggtgggcgtcttctgcattattcgtacccatttgcaattcggtccaccattcgcggaactcttcgagactggaaaactcggtgagtatctctagggctgtgacaggaccaatcccgggaatgccctctgtgtagtcactgcccaagagatgggcgaagctaataagcttccgtcgatggagggcgtactctttctccaagtcagacgtcaagtagcactcaacgaatttactttgattgaacatgtttttgtagactcgcgttcccccgaaaaggaagatatcactgtcatccgtgacaatcccgtccacaaggcctagcgagactaatttggcgcactgcgcttcagcttccataggcgcggtaatatagggcaatccgaagagcgtcaagagctgttgacactcattgatcataatagtagtcacctcgtctgcatcgcgacgctcattcctctgctgagaccgtagttgcttcaattcttgctcgtagtcaaaggcctcctggctaggagcagcagaattaagagtattggcaaatcgaacgtgctcctcaccctcagccgcaagctgcttgaacagctcttcatcttccgggtcactatagtcggcttggtcctgcacaaagtcttcaacctcttcgaagaactgaggctggggctgggccttttgatgggatacaacagtgatctcggggccttgggtgggcagctgagggacaacatcttcgaattctggtgagggagatttttcgctgcgtgaggacagctcttcaaccgcgggaacttgatcctggatttgtgtttcagggcgtccaagtgccgtttcatcgagatttctattgacctgcgctggagctggttcgctcaatggcttctcatggagatttgtaggaagctcattgtaaatcttttcaatgtcctccatctggaagatctgtttggaattctccttctcctcttccgcctcctcctcctccctcttctctagatcaacgacttctgtagtagcggaaatttcgtcaacatcgattatgtccggcgagcgacgattggagaggaacatatgatctggcaccgcagatcgctcatcatccttttcaggatcttcaatgggatcaacgatgaatcccacatctgagcgttcgccaacaaaccaaggaggaagtgggtcaggttgttttggtttctctgtaggtccctttaggaagccccccgcattttcaccaacctcgccagctttatcattatctttcgtgactttagtgagtttgatagattcaaaagggagaggaccaccgaatcgagttggcgcatgtgaggcttttttcgagacctttgttcttgctatggctgcagcaaagtccattccatcatcgctctcggaatcaagatctggcaccgtctcatagggtggagctgattctaccggtcgattgatgggcatatcaggcatatcttcgtcgtcgactttatctggttgtaatgaaagggcaatagcccgttcaaggtcatcgtcatcgccatcgccattaaagaattcatcagtgtcgttgttctgctgctgtgcggcaatatttccctcagcttcaacaaaaagcgagtcatcttcaacctcttgtacacggcggtcgttcaccgactgttgctgtgcagcatgacgcgattcttgtatagcccttctcatgtctaaaacctcattcgtttgaagttggagcgaccggtccaatacaccctcttggaggaaaggaagtttgggaagtcgattcagaccttcgattggaacatcctcgaactcatcttcgtccgatacctcatcctcatcggacagtatctcaggtcgatctagatcgatgggcttctcttcgtgaccttccctgtttcccacaacacctagtacccagccaccttcatgttcgctatccttgacaagcacatattccctgccacgttctcccgcaacgcgcttcccagagttatagaatgcttcgtctccgttcatgccgtttatattcattaatcgttgcgtaaggtcattacgttctgcgacacgctcgatttgaaacctcgagaatgccatgcggtcgggaaacatggtatctagctgctcttttgaataacccattcgaagtcggcttcttagcctcgctgcattcaagatgttgtagcgatcagtggcgggcagactaaggaaaaacaagctgtcgaagtcgattttggaaaaatcgtaaaggttgatatcttgaccctggtggaaatgtctagcatactcctccagttcttcctgggacataatgcgtggatcatttggcgctcccatatcttgaagagagacgtctaggttaggtaggtggtacgcatccttcttcttgaacctgcgattttgttgcttttccgtttctgtcataaaagcctcctctgcgtagaccggagcatctggcacttcttcttcctcttggatatgggtcttattgcgtcgacgagcgttctcctcctccgcactgcgttgcatttgtacggcaagcaactttcccgcggtcctcgcagcatcttccctgtgaccctcgcgtttcttctttcggccagcgattgtctgccttttcatgaccggggccccgccatcgaagacgaagacaggccggatcccgaaatacagcaacttacatatgcgacgaaagaatccgacgatgtgagaatttcgtagcgcattgccttctttgtctcgtaccgccttcagaaattgatagatccagatcgacgcgtcgacagctagtcgttttttgttcagtgtttcgagtttgatagggcgagcgcagggctgcacgaccgtccagaggccggtgacacccatggctagtcaaaggggtattgaatcatgggtgtgtattggggaggtctggcacttaagacaaaatccacatgtagtgagagagctgctcccaggtggttgattagcgatagaggctctgccgagaagtcgtcattccgctcccgcgctcgatcgcgagatcacgtgcgtaatcttgcctcttatggattagcgtttgaattatataagcatgccggggaaaccatcgaaaaagtagttggtgggctttttttggcgtttggtgggatacacttttatctgaggcaattgagacaatccgggtaatcgcttctctgattaatgtgcgtagaagttggcgatgtctttttcgctcgaggtcagtgttgttatactgtagtcaaatgctgtcccgctgactcaagatgcagcatattgatgcttttctcccgataacagcgttgaagacgtttgtattgggtgatagacgatttatctttcaaagtcaaggcacattcttccgggtggttgatgaaatcaccggtattgtcgctgctcaaatccaaatattcaaaagaaacaatattcatggtttcattcctttgaatcaacgaccacaggatcaagattcgaaccatgtccaaataatcgtctggggtggtcgctcagtgcgagcggttgacctcgttttgacctctgatcatgaagtcacgttgtcggcctctagtgccgagttcattgctccagattggatcatgagtgggtgcgcagctgttaccggtggccatcacggggctttttttatcaccgcgaataatgccctcctgagtctcgaagtgctcgacagcgggatgcctgggcgaaatataatatccatatatcaactggcgacaagtgtaaagtccatcctttactccgccgatgtgattgcactgtcttcctctcatgtcctcattgccgctggtaccgtcttcggagaaatcattgtgtggtcgtgtttcttgaataaaaatggattacacaaagctaatgcagttggctctatccaccatttcttcacgggtcatgacggatcaatattcggtgtccgcatctctcctcagatcccgtccttgaatggaggcaagtctggcaggatactcgccagctgcagtgatgatagaactgtgaggatctgggatatatcagattgtgaccacaagacagcccaagatccttccgcatactccacagacgggtttgaattgcgaagcacaggttttggtcctgttgaggcaggcgaggagagcgttggatctgaatcatgtgtggtccaggcctttgctcatgcggctcgtatttggagtgtttatttcagggccatcaaacataataaccaaactcatatgggattggtttctcgtggagaggattgcacatgcgttctgtgggacctaagctggcactcatcatccgctgagacgaatgactatcagctcagccagactacttcaatacaaacacatattggaaagcacatttggtctctagatctttgcagaattggctctgagactgtggtttataccggaggcgccgatggtgcactgaaaagcttccccatcaaagaaaacgacgacgaacatctgggcaatggctctggtgtttcttcccagcaattacctagcttgcaagtaaaggcgaagaacaagcatcccacagccgatggaacgaaagccttcgcatttgtcgcccaagactgccttcttcgcacctctacacaaggtcagatccaacttggatatcttacccaggcggaggagactgccattacttgggagacactatgcgaagcacctgaccttgcttcttttggcgtcatggctgctttaccccagataggtctagcattgatcggtaatttccgaggattcattcggctctataatcacgctacgaaatctgtcatcagcatcacggacgttggtaacagaccccttggaatattcttccttcagactcactcttccaaaatggatatgttgaatttctctcaaaacattgcattccttgtcttttaccctaccggagaagaaataacagttgtcaacgtctcagactggaacagcgatcatccaaatgccgaaataaccacctatagcctaccatcctcatttgtggtttgcagtgcggcttttatcttcgatggccaatatttgattataggatcaaaattcggcgcccttgcaatatacaacacctccgaggccgagcccgtattggtcaaccgtcgtgttcatggccgagagtttgtgaatcacatcagcgtcgtgacatccgttactacgagtgatatcacaaaatcagacttcgtcttgacctgtgggcgagatggaacttattgtctccatgaattgcagctttccgggaatggaaaaaatgttgtaacgatagagacagtgcaccgtacagcatctatcaccggtgggaatattgaaggtgcctacttcgataaaacaaccggcgatttcatgttgtacggattcagatctcaagatttcgtcctgcgcaacgagtcaaagctgacggatatcgtatccattgcttcgggcggctttcgccgaggctgggactttatgccaggagacaaagataacaatgcgctgttcacgtggaaggacggaacttctttgttgactactcgtgtacgagctggtgctagtactttgcttcgagccggaggtcacggacgggaaatcaaagcgatggatgtcttcaaccccaccgatggagatcggtctctttttgcgactggcgcagaggacactactgttcgtatttttacgccgacttcctcattggctgctagtccatggggtagctttgagtgtctgcgcgtcttggatacacacaagtctggcatccagcaggtgacctggtccaaggatggaagatacctattcactagtgctgcatacgaggagtttttcgtgtggagagttcgcaccattcctatattcggcgtttctacgaaattggtggctgcgagtccgaaggacgacccgaactcagatctccggatacctagtttcgatttgctggaagtagaggatgttgacggggagcaaggtttcctcctgtgccttgctctttccaactccattttcaaggtaagggtagttctttttttcaaatattacggccatactaacgtcattgcagatcttccacttttcaccatctaatgggggcaaatttactctcttggctcgtgggaaatacatgaccaactgtttgacacaagcccacttcttggtcacgagctcctccgtgagccttatcaccgctgcgactgatggctacttcacactatgggatctaacaagcacacttgaaccattttacactatcacacaatccattttgaaggccaagcaccccttcgaaggctcctccatctcaccggaaaatatcaaatgcgaaagtcggtatcagatccattccaacagtatcaaggggatggagctggttcctatctctgacacggccactgtcattgtggctggaggtgatgataactctctctccgtgtctctcctacgaacaaatccatccgacaccggcacaaatgcacaggtagctacggtttctatcccagatgcccacgctgcagcagttaccacagtcaaagttctcaaccagcaaatctctcgtgatattacatcaaatacagacaccattcaaatcactgtggcatcttctggcaacgatcaccgaatcaagatatggtcaatcgccgtggaccctacacagcctgacacgaaagggattatcgtgagattcttactggatacatatagctctgtggctgatatatcatcaatggggcttgtccgtgggcctatgaatggcctcttcacagagaaccatgcgtttagtcagttgcgattggttatctgcggtgtgggcatggagatgttcgctgccgaatcggatcgagtcctatctgcatgatgccgatttgatgttgaatatagataagatttcaatgtgacaatatgaacatagacgataccatgtgagattacagactcattgagagggatggcgatagcaaatcaaccgggcaagaggaaaactctagcgaactactcgggtaaccaataagcagattagggcatgcattctagctacaggacaaacctatattcaatattcagcggagccatacgattggacaacatagtgtcttcgtgaattcgtcaaaccacccagctcctcttaaaaaatgaaagcttgactattccaatactaatccatatataccgtgcagtttcggagagttcgccgtattttgcaccaatatggatgaggcggaacgaaccccttttgaggaaatgattcccaaaaggatttaatcaaagggtattgttataggcactccaattaaatggtttcaattatttgtctccgctctagactaagacgaaaacagcatttcctaagacgggatgactatataaggaaagaactatggacgtgtgaatattttctttacaacagactacaataggcatctattccacatcatgaagcatttcattactatgatcgccgtcgctgggctggctgctgctgctcccttgcaatctcgcgatacgaacagttatttcttcacattgtaagtgataaactgcgtcctttattcatcgccggttgggaaaggagctaagagcacccgcagtggggattcctacaccatgaccagtttcgatatcgatggcacgcagccaactgctagcaatccaatggggaatccagcactgggtaggttttgttcgcccatctggcaagcaggcttgactgattaaagacaataggtaccggaacaaccaccggcggtgtcaactgggtgggatacctgactaccgtgaacaatgcctcactagtccttagttataacctcgctgttgggggagcatctctcgataattcccttgtgaataccaacgtcgaagatatggtaacgcaagtcgccagcttcgagacaacatatagtcagaagcctgatattgcaccgtggacttcagacaacgcaatttttggattctggattggaattaatgagtacggtcccctggattcccgctaacagctaactaactccaatttacagcattggttgggcttggtcaagcaacgatgccagtgttctgattccaaagatcatggcccagtataagactcaagctgaaaatatctacgcaaatggaggacggaagttcatcttcctcaatgtcccgcctacaagccgatctccccaaatcgccgatcaagggacaaccgttgcagccggccacgctaagtggctcgcggctttcaacactgcccttcaaacaatggtcaatgaattcattgaagataacagtggcgtatgttcaagctgattatatacttttgcacaattaacctggctgcagactacaaccgttttctacaatacattcaccttcatgagcaaggtcctcgacgcccctacaacatatggattcaccaatgctagttgtgtcagtgacgatggtgctacctgtgtctggtggaattcctaccacccaggttatgcttaccacaagctgcaggcagcggatatgaaagagcacatgcactctttcggtgcttggtagactcttttggatgatctaggaaggattgtatgtcggactaagactggtaaggttcaaagctcaataaatatgtattcctgtctctttgcgagtgaatatcgatatttttgaccgcgatggttcctgttcagcttgcaatcaacttgccacgcttacttgactcacacatttggttttcttatgttcaaaacgaatgtattcttagttaataaatatggattattcacgcatattacactccactaccccctgcatgtcaggaatcatagttaaatgccgatcgatactggaagcaccacgggcttgaaagccacctgtgtctgaagaactatttcttggggattggagcggggtatgtacgatggatgtacagtgataattcttcttggttgaacatggatcaggcttcttctagtctaaagactcggggacattgccttcttggctatccgtttcgcatgaggtcgccaagaaggacttttctcagcatgacccatgatgttgtggatcctcattggcattgaagtattattaggcactgtaatatccgaagctgtttcacggggctactgcacggagtacagacaccactttagtatcagggactgaaaatccatgaaactccgtgtccttttctgtcatcgatttccaattttcatatggttgtacttattgggatatcctgcaggctattcgacgatatacattaatttagcaataggaaacacctgagatatccaagttgatccctgctgttggtgtcatttcgcattctctcacatcactcctcttcttttctggacttaaccattcatcccatacagcaaagagcttgactcggcaatatgagactcggtcaaattgccttcctcgccgttgtggctggacccgcagcagcagttcctacaaagaaccatgcaaagagagcttcgccctttcaatgtgcgagtccatgagttccaaagatatttctgacaatccattgaccaaatttctcgtatagggttcggaacaagcgagtccggagctgagtttggcgaggaccaaattcctggcgtctatgtgagttggccaaacatgtcttcggagaagctccactgataaaaatcggaatagggaaccgattatatcttcccggatgctagcaccattcaaattttgactggaaaaggaatgaacatcttccgggtggacttcctgatggaacggctggtaccggactccatgacaggcgggtttgacgatgcctaccttagcaatctgaccacggtatgttgtgccgtatctatccctaagggaacaagcgcatactgatctagtagcagacggtcaaagccatcaccgatgcaggatcccacgccgttcttgatccgcacaactatggaagattgtaaatattccatcgaaccaacgaatgaatcgaagctgatgagtgtacatagcaacggcgagatcatttcgagcacatccgactttcagacattctggaagaacgtcgcaggcgaattcgcttctaatgagctggtcattttcgacacaagttagtaccccagatcttgagtcgtatcacaaaaagtctgttaaccgcatcatgcatagacaacgagtaccacgacatggaccaagacctcgtcctacagctcaaccaggcagccattgacggcatccgcgaagcaggagcaacaagccaatatatcttcgtcgagggcaactcttggaccggcgcgtggacctgggtcgacgtgaacgataacctgaaggacctgaccgacccccaagacaagattgtctatgagatgcaccagtacctcgactcggacgggtcaggcacgagcgagatatgtgtttcgacgacgatcggagaagagcgtgtgacggacgcgacacagtggctgaaggataacggtaaggttggggttttaggcgagtttgccggtggtgtgaatgatgattgcaaggcggcgatcacaggcatgcttgattacctgggtgacaactcggatgtgtggctcggggcattgtggtgggctgccggaccttggtggggtgattatatctttagtatggaacctaccactggggcagcgtacacaggcatgttgtcgacgcttgagccatatctggagtaaaatctctggattgaggcaaatgcgaacatacacacatagtccatatgcagcatgtgagttatcgagttcggttgctgtaatatgcgaaagaaagaaagaaagcaactgcttttcgaaatgaacgtatctttttcttaaagtattagagaaaaagactcaaatttccgatggccatagcttatgtatcagatgtcttgtcgggcagcgcaaaaatgggtaggtttgtcagagcgggggggttcccaaattcagagaagtttatctggaaatcataaatatagaacaaggcatcaccattagtggaatttgccctgtgcagagacagcggagtgcgagtggaatggtatacaacataggacaggaaggtggggatacggagataatgccaagagagaaatagaggagcctggcatctatcccgtacatacggtactccatacccaggcttacgcagtcttgaggcggagagggaaaaatttgaaatgatccacaaggctgatcagagtcgaaagggtgacgaggctcggattggggaattgcctgttttggccacttggaatgaagatcctggggcggtcagaactagatatgacgaagtttgatagattggatctcgtgtgtacctacactgtctacgttttatttaggggtatttccgacagtgtaatctgcctacactatttagaaaaatataatctttacggatcaaaagcatatccaaaatatagttcttccatctgatctgactgtgtcgactgtggatgtagggataagcagatgaaggaccattccgctagacctaaataggactagtcaagcccagaaatagaagcaaacgtggccctggcgacgtgaccgctcagccctgattggcccgctgatcctgcgcctccttccctgggaggctggagtttctgtttagtgtgaggctgtgcgttcccagggttgaacgttgtttacgaggtctattgggggcggaggggcatttatattaaagtcttccctccatctcacctctccacttctcatccatctttcacctctttctctatattcccatcttccataaatacatcttcatcatgggaaaagctggtcgtgtcgcgtgtatcttcacgccctatgtcttgaccatcgcatcattgatctgcatcattttggtgggattgggctgcacaaaagccagttcttcgaccttgaataatctatacttcattcgtgtaagtgatcaaagattctacatggttactgcatccgctaatgccaataatctatagctcgacctctcgaacataagtgaaggatcggcacttacatcagaaatcacagatcgcctcagtgctgccggtatcactgatgtcactgcggatgaggtctcggagaccatcgaaacactgcaggctgatgccaatatttctgatttctacgacatcggtctctggggttactgcgagggaaatatcaccaacagcacggataccgtctccagctgcacagaccccaaggccgagttctacttcaacccgtctacaatcctaggagtgagcgagaccgagcttgagaaggagattggcagcgacctgaagaagaccatgaaaatttacaaggctgtctccaagtggatgttcattgcctacctagtcgcgtttattgccacttgcgcccaggtcctgcttggtatcttcgccatcttcagccgctggggcagctgcgtcaccacgattgtctcgattgtttcgttcctcttcacccttggcgcatcgcttacctcgactatcatgttctcgatcgcaaaaagctccctcggcacagtcctcgaggtctatggtatcgatgtaagcctgggtaagaacatatacgccgccacctggctcgcagtcgctttctctctgggagccaccttcttctggatgctcagcacctgctgttgctccggccgctcgccctacggccacagggaccgcagcccccgcggcatcaccgcagagaaggccccctacacttatgagcccatcggtgccgcccacccacccttcggttctcagcagccccttgttccccaacacggctacagcacctcttaccctgctgccacccacaacaacgatatccccatgacccacaacaaccagcagtcaagcgcctacgagccattccgccatgcttaaaagattgggctttcaatgactgtgcaccccttctgaagcgattttagattggcgataccaaggcgttctcgtgtttgttatttttttttttttgcatgcttttaatgtccatgtccttttcctgattcttgatgatcatcacgccattttgcatagcgagactacggtctctatgggagggaacatctgcatttttgtatatatttttatgatcctttacgaaggaatcattagtatctatttgcctgcaaattgtttcaactacaaaatccacttccaaataacatctggcttaatccctctaactttgtagaaccacttaaatgcctgatttgaccaatcacaaacagcttacaatcagaaatttcggagtccccaatcctactcgtattgacctagtttgtatgtatatacattgcagcatggaaatagctcctctagctcatgaggctcatttctttgtgggtccaaatatacatagctccaacaccatcgtgaaataagacagacagtgacccttgcgagggaggtggagagcgttaggggggcaaagctaggatctgcagcgaggctcgagccctgttttactattagtactgccgatctctacttcgctatttgcacccgtggaccgatgtttgatgctgtcagaggcgttgagttgggccccacggggaatttggcataagaatccgattgggggagttgtctgacttttcactttacatatgaaacatgcgcaagattactattccgtgaattgtcgggcttagtacgcagtactccctatggaatacaatataggtattatcactagtattacggagtaggaaagggggtttcagggcttaggtcttctggttcaatattcagagtagataaatgataacgtacaaaaaaaaataaaattatataagacggtataccatctcatattatgcttccttctgcttgaataaggatgaaacgaaatggtatttgttgttatgcttgccgttgcgctgagccagccgctggcccgtggaaaatggagatacttggtgaatattataatattcaggggccagggttcttgtcttgatctcggttgtaggtggggtaacgaatgacacccttctcatcggttagaaccctaactccaccgcgacggttgagttcctgaagaacgttctggtcttggcgagcccagcgcttgaacggtgtgtcggggtcatcggaccacacaggacctttgggccatatgttccgaagagaccggaaccagggtcttcgtcgccttggctgctcgggctcggaattattgagagcgcccagggccgcaggcggggcgggcggagcgggagagacagagatgcggcgatcgtcagtgtcatcgccgagttcaatactggcagtctcatggtgagtaccatctccttcctgtgtctcctcgatttcgtccatgtcggcttcggccatgtcaacgtcgttcggatcaggcgcgaagcgaacgctctctgcgtcggatcgcgttgcatcggttgtctcttcgtcatgactgaagaacacaggcttttgatcgtcgctgctggtgatattttgggagccaatttgtccattgaaagaatcatctgcttcaattttcacaaccactgaatccgagccggtgctaggataggaggatgacgatgactgcgttgctgttggcatgcagacatccggaacaggagcatcaccaaaggactgagcatggaggtttgagaatcttcccacaagactggccgtgaaagaattattggccacttcgctttgtatcgctttatcctgggttacatcgccttggattgtcacttcatttggaaccggcgaatttcttaactcggtactggtaggcggaacaaactgagaggcgactatgtcaattccgtgggctgttaggcttctctttttgtggtgagggcgtgagaatctcgagcaaaaaaaatcttcgtaatttagtgtcttcgaattttcaaatatatgctctgtaagatagcgcgagtactcctccaggtattggatgacaaagtcatcccataggaacgatcgttggagttggcccttttgtcgtactgcctgcaatttcgaacacatctcagtgaagtgagcaaaaccaccagcgtacggcgaataatcattgcagaatttttcatagactgtctgtgcttcggcgtactcgtcagaattgccgatagagccttgtcgccgtgctaccaactcgacatttggaccgtgagccgccttttggccagtatcaacaccctcgcagcccggagggcgtgaatatttagggcgtttagatggggactctccgtgggcagcgaccgaggtggtgaattccataggcgacaattccggcaactgcgatcctccgtcgagtcctcccggagaatgttggcttagttcatgaagttgagacgtggacagcgagtgagacccgacatcaggaaaagatgatgggttgtctgagggatctaaacggaagatagacgacccacggtgtcgttgaacaggtctcgatgaatcaagtacgtctggggacgactgaactgtagcctgtgagagtgcatgtacgctgcttgtttgagtctgagtacccagcacatccattagcggtggttcgtcttgggataaatcactgtgcccgtggttatcttgcgagcggtaggtattcggaattcgggacgagggggatgtcttagtagcttcagagtatggctgctgagagctcgggagctgaaccccagttctctgttcgctttgtttcccgggatttagacgtgtattattggctgcaggtgtctccaccacttggatagtcccccctgcaaatcttggaagcgacggtcccgagctagtaggttcctgctcaggctggctgcttaacggaaggcttccacccagagcgaaaggaacatatgtttccatctctggctcatcgctctcatcgctgcttgattcatcacgcatttcagatctaagtgggatagttttggcgggtgattggtcatgctcttgtgttatgcttgggggttggtcattgaccacatcgaccgactttgaagcgttgtgctcttggggtaggtcaggatcatggtccaaaggcaatggacttctgggttttgttgttacttcctcgggagatggagaacattgttgctctgctgttctagtatcgtttcttgatgagacaatatcccccggtcctggctgaggagcactgcaagacccgttcaccatgtctacatccccattttttatagactgatcaacgctatattgagtgccagttggcggagaagctcctctgataggccgtatgtatcttgggggagaagcggtgtcccgtggaagaacatctcgagcaggggccctatcgggggacggagaccatggtatgggagatgtagagggctcttgcggtgtagaggtaagcgcacgttcagatagtcgctcttctgcttctgcttcttctgccaaatgttgtcttcttcgtgcaatattgttccactgcgtcaaaagacgaggcggtacatggcatagaggtgtagatataccggggtcctgagggatccatttgagcccttccaaaagttctgcttggtcttttggaatatgaacttcgctcagaggtattttcatcattccatcccatggacttgttgcggacgggcacccgatgtctgtcttggtgtttacgatctgtaccctaggaggcgattgcatgagcttgttttgtactcgctcggatttatttggcggaatcacctcaccagcatcaatgcgctgtcgctttttggagggtggtgtatttgaactttgccggccctgcgagctcaggccatcattgtgaattagcacatctgtactaccacgatgtcttttttttgacggctgaatgtcccccattccaacattgcgagccgggccatgatcatccgactcattgggaggttgtgtgcccgtacactccgctataaagtctaccacttctttttcaatatctgcgtaagattgattggtaacatattcactagagcgcgtcgaattagcaatgttgctatcaagtctccgaaacgagggttctatttcggtgaaaggtctgccaatttctggtgccactgacattcctgtatttggcaagggagaatgcctgctttcactttcaccaagaggtagtccgtgggcctcgagcacctctctagtggctgcgtaatttgtttgaattggatgagaaggagcgagcaatcctagaagatctgatgacccgttgagggaaacacgactggtcattgcattactcttcggtgcgccatggcgcatattagacgggggttgggagaagagcaactgtgatgccatattggtttgagaatgattgagcggcatagttcgatcacgctgagaagcaaatgggtcggtcaatctagcatttgtttgatcgttggagctagcatgccctcgcgtcttttggattttgtcgcatgccatagtcatcagggctctaagagccgttgttttcttgagctttggtttcggtacatcccctctcggaaccgcattcgggtggatagtaaaccgtttaatttggaggcagacatccggggcaggtgctgagtacgttaaaatgagcttgatgtcgaaaagttcaactaggtgcctagggcctcctttaagcgacggtggacagggtgatgttgctccctgtacgtccggcgagtcttgtaaaataatcgcatcaatctggttctttgaatctgtaaatgtggcgcaatgactcttctctccttctccccactaacagacgaaagacatatagttagcaacaactctttcctttttttcgcattcgctcggggtattttaccgatacaacaacggctgtcttgagtgtcggcttgcagaaactgaagctgagacatccgtcgatatcttccacctggacttcatcttgatcattttgaccgatataaaatgagagacattggtcggccaaagccgcgatccagggacttactggattcatcgtgcgaatccagccttgtagtcaatgttgtacacagcatatatgtcatagctggtaagagtagacagtgggcatgggatgtttgtagccccggagtttgtagaaaaagagcgaaggtcgtcaaaaaaacccaccactcaaccgcgtcttatcgattgtgacctgccaagacccccccccggggggcggggcgcgccccgcctnnnnnnnnnnnnnnnnnnnnnnnnnnnnnnnnnnnnnnnnnnnnnnnnnnnnnnnnnnnnnnnnnnnnnnnnnnnnnnnnnnnnnnnnnnnnnnnnnnnnnnnnnnnnnnnnnnnnnnnnnnnnnnnnnnnnnnnnnnnnnnnnnnnnnnnnnnnnnnnnnnnnnnnnnnnnnnnnnnnnnnnnnnnnnnnnctcgggaggtcgggacgcgcctagcttactcagcaccaacacgtcattcaacgtgcggagggcaaagggacctattctttttttctttttttgaaagaagtttctttgatccgatcagtctgacagacgctcttatcgaccctcgatactcttttttctgccaaactcgctaaactcgccaaacctgagaccttcccgcagttctgcccgaatggtcggctataaaggtgcctagatcctgtgcggagatgatctgagacctttctgcctaacttggcgatggattctcagcactcccaggactcacaaagtccatcggcgtcttccaattcgcttcctcttgagcgacgcggatcacgcagctctatggccacgactcagaccgagcgagaatcgatgaatgcagctctggataactaccataatgcagcgtatcagtccgagtccctcactctcttcaacgattttactagtccgccagccccggctgccatatcggatgagaaaagactgtctgacgaattacaaggtggactaagcggtctgtatagtcgctttaggacttccgtcggaggggtgagggatattgtcagcggtggcggaaaaactgcagacaaaaatccgacagagactcctgcagtcaaaagtcttgtttcggagaattcgctggcaaacccagtctcggacgtggctacaagctccgctgattatctgccatcacagcccaactcgtcacaaggatcaaggctacactcgcctgttgtgccagacttccacacttatcaagaacctgtgcaacaagcaaatataggaaagagatcaagaatatcctcgaaaaatggcagcatatcttccaaggcctccgtgtcaccatcccttggaatcaagcccagtatcgcaccgttaacgaaagccaccggtagcgccattgtggcagaccctgcagtcactcaacttcatgtgaacgtagtcgggaaagctgactgctcaagaagcagctccattaatggtcccttccagggaatccataatgcaggatcgacaagtatcggtagcaaggaaggctctatggatcttcccatgagtcaaacatcctcttcattgagtcagaacctttctaattcaccagttttgtctgcaaagatgcatgaaagccatcatgaggaattcaacctcacagactcagcaacatatactcctgacaaccagtctcggaagtccgtctctactctagatcaacaaaagctgcctgaacactcgtctcaatcagctaacatgcgagataccaagcaatctgagccagttcaggatcatgcatctcagcatccggcagaaagatcaaaatcaagagcatctttcccttctgaagagccgaaagcttcggtttctacgtcaaatagtttatcaaaactttcctctcacgactcagtaccgtacaatgctgaaaaactcccaaccaacatggagacaaccattcctcgtgacagctctaactccaatgagcctgcaaaggtcacagctcccggtagatccaatgaggagtcaacgccctcaatccgagcagcgcggctgcctggctacgtgatttcacgggcctccacggccgagacgaccacaacggtctcctcattgccgcctttgaagactgatttcgatcgggctactagccaagccaggcgtcaacctcccgccgggggcgacggtgttttatcgcagctaagaagtaaactacttagcagggatttttggatgcgggatgagaatgccaaagactgctttcattgcggagaacctttcacaacatttcgcagaaagcaccactgtcgaacttgtggtcaaatctttgattcgaaatgcactctgctcatttcgggaacacggttcggacagcctggtaatattcgggtttgcaaaccctgcgagaagatgatcaatgcgcacgatgatgattcatctgaattctccgacagcgagcagagccccatagtggccaatcctcgggtttctgaactcacctggaccagtcctggacgagcatctgcggatgacgatgattcatcttcggttgtgtctcaatcaatcgatcacgttctgagaaccccgacgatggctataccggccacacgacgtgctggagagggacataaccgccgctcggcaattcttgaaattgattctgatcgccctttaacacgacctacctcttcgcgctctctgcggtcttcgctgggtggaagaccacactccctcagtcacaaacgtcaccactctcgtcagcaatatattcggggctttaagccatatcatgaagaccgagcccccttccaacgccgacatgcagatgacatagacgctgaatctcgactccctgcctttcataaagataatatcattgaccctgaccttgctcaatatctctcggatgatgcatccagtggcgatgagcaacctagcctcctgtctgcggtctctgagggcactctgtctaaaagtgggggtgaaaatgagaaagcatcatttggtgggcttctcgctgccatgaaaaagggtagatctgcttttggagaccgaagtactcccagtacgaatcgagacgcagacgaagccagtatcacgagttcaagagccgtgaatctccctcgtttttctcgacgtcgaaacttgagcgttactagcagttatcagccgcgtcattcacccaggacatctaaggacaatatgccccctcatgacaactcagcaccagtcatatctttacccgagaatgtaaagcagggtgggttcaagatgactcgaagttcatcaatgagaggcattgatgcgccacctgtggaattgaacaaagcgagtctggaacacgtacgaaagcttctccatcaactgcttgtagagtctgctgtgccaaattgcgacagctgggaaaacgctttgatgccaatactgttgaaggcagcagatgaggttgatccagatgtccaaaaaggagatgatatggacattcgacactacgtcaaattgaagaagattccgggcggccgacctggtgacacttcttatgtatcaggactcgttttcaccaaaaatttggccctgaaaggcatgtcacggaacatttcacgtccaaacattttgatcatcacatttcctcttgaatatgctcgtcaacaacaacattttatgagtctcgaacctgtcattcgacaagagcgtgagtttctagaaaacttggtcagtcggatcgcagcattgcgtccaaacttgcttttggtcgagaaaactgtttctggcctggctcttggcctcctcgagcaagctgggattgccactgcatacaacgtgaagccatctgttctagaggctgtgtcgagatgtacacagactaggattatgacatctatggataagctcttgacgaccacattgcatagtgaatgcagcagtttcgacgtgaaaacctacgttcataatggtcggaagaaaacatatatgtacatttccgggtgtccgaaagagctcgggtgtaccattatcctgcgtggaggggatgatcaagtcctcgggaatgtgaaaagcatcactgagttcatggtctatgttgtgtacaacctccgtctagaaacaaatcttatgcgagatgaattcggcaggatatcaacctcgccgacagaagaatcagcagttgggcacaaagacaataaattcaatccgcagattaccactcacgaaggcaacgcacatctagtcgacctatctaatgctcagcagggagccaacgagaaacgtggtgatatctctgatagccaaattcttgttgatgccgatgctgcaaaagttcctgacaacatcccaatgccgacatactataacgatatggttaaggattacgagacaaagattttgtcggcctctcctttcgtaaaattcgaggctccgtatctcctaacgcgtgcgcgcgaaatggaacgcaggctttcgtatttgaagtctcttcgtgatcaagaccgcaattctaaccagatcaccgatgaaaaggtcaaaccgcaaaagtttgtcctcatcaccccggaaatggtccatcaatcaccgcaagatgcgccagcaaaagtcaaggaagtattgcatgctgcgcatgaagccgagtacgaccgggctctttatcaccatcaaactcaaaagcgccaatgggaagcctatgtggcggggaattccaacatgtttgatccttatgcgcatcagaatttggtcattctctacagtgttgtgtgtacaacaacatcagtcccctgctcagggccagatacctttgccttggagttctataatgagcatggagatgacacaatcttcgagtcagatctcacaattgggcagtatgtagaggacctttgtcacacagcaaattccgtatgtaccgtcaacggctgcgagaaacgcatgttcgaacaccaccgccagtacgtacatggcgaggctcagatcagtgtcctggtccagccttatccttctaagctccgtgggctccataatgccgtgctgatgtggagctgttgcaaaatttgcggcaatgaaactcaagttatgcctatgtccccgagcacatggaaatattcattcggaaaatatctggagctgtgtttctggggcagacacttgcttgctcgtactggaggttgctctcatgatttgcggcgggattatctccactattttggctacagggatcttgctttgcgggtccaatatgaccctattcgtcttctggagattatcgttccacggcctcgtgtcacttggaaggtggacaacgatctgaggctgaggaacgaagtatatttgcgtaccgagcaacgtctcaacaaattcatgatctctgttcaagaccgactgaaaggcatcaatgccgagagtgttgttcccgagctactggagagctgcaagacgaaaatcgaaactttgatcaagaagagtcatgaagaccatagctctttggtccggcacttacaagacaaatacacaagttctcgctattgggagatcataccgctgaatgaggtcctccgtgcagttcaagaaaaggttgtcgaatgggacacgatatttgccgatttcgagatgaactttttcccatctgagaaggatatcaagcatatggcaacactgcaactcaaaaagatcttcctcgacaaagatgcaacatcggtttctacagatgatgccctcgaaactcccacggatgttgaagatgagaacgaccaggaagatgacaggccacggatgatgcgacgtatgacactttcaccggagaaggcacaggatgtactggtctccgttgtcgaggagcacactggcaaaaagcaccgcgaggacctcgaagaagtcgagttgcactcgcctccagcgtcggctgaggaagcaactttatcagtcgatgcaattggtgggacgaggtcttctccccaggatgaggctgtctcacaagaagtacgacatctcgacttggctgttcctgtcggccatgctagcatttcgaatcaatctcctataaacaccgatctccctgtgatgatttccggcgacggatcatcggaattatcaccaccggaaagctctaggattcccgatcaaggaaccaagaatggaaccgaagacagcgtatctcctgacatagcaaataccccagtacgtcggccttcagcaataccgaggcctaccgagctagcctttcgacgcaccggtaagatacggtctcctccgcttttgcgtactcagtctcagccagctgcgaatctaccacgatcatctcacagcattcaacttccggggttgaaactagcgttcgccaacccatccgatccggaaacccctgcagtgcaatcaccaacaaagtcatcggatagaaagctgagcgatcgtttaggcttaagttccctcaagagtgcccgatttgccgcgggtcagtcgcttattccacggtcaaggggaatatcgcaggtttctcacctcgccaggcattttgagcaattgagtcgtgaattcgagaaagagagacagcgcgaaagacgtcaacgcactgccaagggcactcagtcccgagcattcccattggcgtcctcgaagcccatcgtggaggtctatcgaaatgtacgagaggctgttgaagaacgcgaaccgccggttgatagtgatgaatatctgccctcggctccccggatcccaatggatgacatgagtcgcaagagtgatgaacttacgcatgatcataaaactcataatgagccctctctggcaagcgagtctcccgcagagcctatgaaagtagacagtgcactctgtcctgacgacgaactcttgtctggcgacgaagcagatgatcaccaaagtgatgaggatcaaaacatagttgaagatctccatccagtagattcacatgaagagaccaaacagtcaccagaggatgattcaattgatttcaaagaactccctaaacatgagcgtaccacgcttctgaaaatgctgacaaacttctggtctgaacgttctgcaagtggttgggcgtctcttgactatccactcagtgtcatggatcatgtctttgctgattgcaatattattgttcgcgaggatgaaccaagctctttggtagccttcgctttggactcttccgattacaaagaaaaactttcaaccattcaacagcggtttgacgagacggaagaacaaaaaccagatgccggagacgacatcgaggctgcgaaggaagcacaggtcgaacatgctctcttgcgacctacgggcacacacctaaagtatcaattccaagaaggtcaggccaagatgctgtgcaaagtgttctacgccgagcagtttgatgctctgcgtaaaaagtgtggtgtggcagatcgaatcgtcgagtcattgtctcggtgtgcaaagtgggactcaaagggtggcaagacaaaatcgttgttcctaaagacccttgatgaccgtttcattctcaagtctctctcaacgattgagacgcaggctttcctcaaattcgccccggcgtatttccaaatcatgtccgaagccctgtttcatgaactcccttccgcaatcgctaagatgttcggcttttaccaagtcattatcaagaacccagtcactggaaccgagttcaattggttcttgttgttaatggagaacttgttctatgaccgtgtccctacgcgcatattcgatttgaagggctcaatgcgaaaccgcaaagtagagagtaccggtgaacgggacgaggtcctcttggacgaaaacatggtggatttcatctatgaaacccctctctttgcccgcgagcattcaaagaaacttcttggccaaagtgtatggaatgacacactctttttgggtcgtcaagacgtcatggactactcactcatgatcgccatcgatgaaagccgcaatgaactggtggtagggatcattgactgcattcgcacctacacctgggacaaaaagctcgagtcctggatcaaggacaaaggatttgctggcggtgggcgaaatcgaccgacggtcacaagtcctagagaatataagggtcgtttccgtgaggcaatggctagatatgtgcttcaagctccaaggttagttgatatatattccctcgggtgtgcgactgaatactaacgagtttagctgctggcatcaattcccatcaaatgcgatgtaccgctatgagaaccagaacactgaagttgagactgttgatgggaacgggtttgtggaagacactggttactgatagcttcttagacagtcttcgttttgatctgcgcccatgaactgcttacattaatgatttatgacctgacgaattttcatgagacggagtgcagggtgatgtttcatgtgttgggaatttcttgtcatcatgccttaacattgcctctagacattcatttcataccaacattctcatagccagtcccgaatctttttgcctacctctgtacgcagtaacacgtacactgctagaggcgcgtggcctttttggctcatcgcaggcgagcgttgggccggatgcgctagccatgctagtcgtggcattcctgaagatgaaccatggccggtttcccgggccaaatagcttgggtgaccagtttcttgctcttctacagttctatggtactcaggttgacctcaagtctgtcggtgtcgccgtggatccccccgggcttttcagcacagacatgttgcctgtagctcgcggggctgatgaaactgcccaccagcgcggtcagcgttctctgatcaacgtcaagcggaccgctgcgggaaagctcaatatgcctctcttcatatttgtgttgtgaaaagcagcaccctgcaagccctgtcactcttgatctcctgctttccagtgcgatctcgggttaccctaatattagaactttagcaaactgccgggccgactggtttctagatgtgcaagcggataagccatgagaagtcatatttatgagatcttgttttatgccaccaattaattcgagttctcatcggtttggggagaagtaggaagttatattgttgcccaacttccaaagcgttcagcataagtagtctatatattttgaaaaaggcaaagaaatccgttaattaaaggtatgtaggtgcaaccaggagacactgatttgcgtagaaaatggaacggccatcgaaatgttattcgataggccaagggggctgcctttttaggaagggggtagctcatgcgcttcaccaatgagaatatgccgacccttgcccttgtttcggtggagatgattcgtattccacaaccacatcatctttgcggtggatacgccccagtgggaggctatttttcccgtggtcatcgttatgaaggatgctctcttgactctcttgatcgtcgatgttggtgaaacagaggtcatcgtgcggttttgattgcttggagcgatggaatgaggaggggaaattgctgctggtcttgagctgatcgctctttccttgactgtatgagcccattgctcgtttgccgagaaggatttcgaggagtggttgtaaggtggggatgcacgatgctaaaacaacgacgtcggcctcaatactagacggagaacaaagggttagatcatataacaagaggatcggatggaagatgcttacttggtccacatgacaaggtcggcagtaccgtcttttgtttggtcagcctttggttaaagcgagaaggataataaggacatacatgtgtagtcggatttgtcggcaagtccatgcagctgggtacactttataattgccatcgcagaagcacttcatcgccactttggtcagcttctgggtagtatggtatgagttggggaggtatcaacttacattccaccaagccctaaagcagcacatagcgcaattctctttcgtagagacatttggagtttcaacaagacggttgttggataaacggccagagttagatcagcaagagcagagatagctagaagtatggggttaattccaagacatatgtttcaaggggatgagacctacatccagtgaagatagcaaagtcaatgagtaacgctgtacttttgcacttggcgcctgctgcgacaagttcaggcttccacaatgcctctgctggatcgcacattgtgaacaagattataatgcaggtaatagacacgacgcttgtggttccaaccatcgtccacagcatcgccttatgcagtggtttggggttcaagatccgggtcaacatggaagtcacagcaatcttgggaagagtgaaagagaaaatcccgaacaaaaagctgactgtattgagtagaatggccttctccagattgtccgtactcaagtacttggaatgttttccataacccacacccacacctgctgtagagattccgcaatatgcaaaccccattatctagtacacaagctccggttagattcacctcgaaaggacagaaagcctcttaccatggaaaccacaatcaaataatcatccaaaccaaagttccgcagtagcttgagccggatgtagaccctagccacaaccataacggcagttagccccgtcaaggtccacagtacagccaggatcttgggacccttgtcatcgtgaagatttccggcggtgaccaccattgtctcaatcttgatgcagaaacagcggggaaaggccagaaagtgcgaaagagtgcgaccccgttatggagtagtttatatatagccctacaggaaagggcctgctaaaaccaacaatagcacataagagttcacatgagatatgtacatggaagtaagtacaggattgatttcagtgtgccattattcgatcagtcactccgtactattattttcctgaaactccgttaaacagccaatccttcgagattttagttgcgatgatcgtcctattttggtaagcgcattgttcatcattgtttgacgatttatctccgaggtcatcgtctacaatagtattatagctagctcgtttttacggagtactccgtagtcggataggggtatgatccctgtcacgctagctagttagtcgatgccgctaaacgaaatgacagcagtctcggaatgggaccccaatacccggtggacgggcctgcatcgtaggcagtagcttgagatactccgcgtgcactgccctcatgtcgaataaccggggttttatttggaaatatctggccaacctactccgtagtctagaaagaaacaattgtaccatgcagtgtagatcttgggtgaagtctagatcatattctgggttctaaaaatttgctgacatttcaacctggattttacgagtcccaccgtaatacgaagagagtgggtggtttctaatccaccagctcgcctcgtgggtcttttttttttcaagtccaagttgaaaatagacaaaagtacggagtacggagtactacggggttaagtacgtcgtcgaatataaggagtgcagagcacgaagtagcccgtgcgaacaagcgaaatatcgttaaaaaaaacaccaaaaaagcgcgattagccgtctcgatgtgggtatttggtgtggatattaatgtattccggtccattgagccgattctatcagaatctcagccctctctgatcaattccacatactccgcttatatatttacgcgattcgttgaggacaaagtacatgccttgtacttttgcacttggatggggaattagctttagccaggtcattttagcacatcaactgcctataacgtataatgagtattcctttgggacatcttgtgatagatccatccatggatgtgggcccatccgctctaattttattgtgatgatccttgagttattcggtacttattatatacataggtacaacataccaagtgatattcttggcttgggcgagccgttagacaatctgctcgtttgttacctgaataggaagaccgttgaaccgttgcgtctccacttcctttgtcccaactggcaccgacttactccgtagtgtcggtggaacctatcttctagcacagtgctccagtgggatgaataccagccggtcttcatgatagcggatccatatgattgaacccggtccaaccgttgctcagctggcgtagcttcattaaagaaaaggagacagtgactgtagcttgtttcaaaaaaggggatacgtagataatgaatgtagtatatttaaagacccctggagtacttttgacttggatcacttcatattcttctgcactcccacgctatctatattacattacattcacaatggccgacattgcaacccttacattgagtgaaaccacccaagctaatgggaactcacacacggagggcacaatccatgcaactggagattgccagaccagcggaggcctcgaggaggccttcgtcgaccgcgtagcaatttccgccaacacacccgagctcgttcctggcctggttgatcagattgcttcccttggcaaagtcgccagcctgcaagacaacaccgatcgaacaacccttttggaagccgctcgatccctggtctacgcacttgagaccccacgtgaggctatgatcagatactgttggtctcaggtaaattcccgtgcttctaaggcacacctttgtgctgttgacggcaactaatattgatatcatagtctaccctttacgcttctttggaaacaggtgttgatctgggcctttttgctatcttgtccaaggatgacaagcccaagtctgctgccgagttggccaaggccaccggtgctgacccagttcttcttggtacgtaacttgccatccgtcctgtgctttgtcggtacactttactaactacatatttgtttagctcgcattctgaagcacttgtgcgcaatgggagttatcctcgagactggtcctaatgaataccgccgaaccggagtttcaatctcgctaagcttgcaacgatacaatgatgcatacccttgcatgtaagtcggaatttgtgggcatataatccaaaaggatgatattaactcattggttaggactaattgcatcaccgccggtgtgcttgctctacctgcccagctcaaaaaggacggctataccaacccatcaaacggcaaggattgcgctttccagcgcggattccgaaccgatctccacttcttcgactttatgaaggagaacctagatgccgctagccagtttaacaatcacatgtctgcctaccaccaaggccgtcctagctggatggatgtcggtttcttcgacgtgcccagcctgttccccgatgtcacacaggacgatgttctcctcgtcgatgtcggcggcagtttaggccacgatatttcggagtttaagcgcaagtggcctgatgctcctggacgtctggtgatccaggatcttcccgatgtggtcgctcaagccaagtcaggacagctagatccgtcgatcgagacattagagcatgacttcttcaatgagcagcctatcaagggtatgatttccccttctatgaccccctctcaactcagatcaaaactaatattttcttctaaaggtgctcgcgcctactatatgcactctgtcctgcacgactggtcagacgataactgccgcaagatcttgaagggtctcgtgaatgccatgaagcgcggacacagcaaggtgcttattaacgagaatgtcatccctgataccaacgcgtactgggagacaaccagtctggatattattatgatggctgatttcgcttcgaccgagcgaactgaagctcattggcaccaactggtgggatccgctgggttgaaaatcacgaagatttggaatgcccagaaaggagtcgagagtcttatcgagtgcgaattggcatagatgccacctaggtaatgggatctgatactcaggatgatagattgtactggttttgaattaatggatatattttagcatatgtacgggccgcgccacaaattgtaagagccgaaagcaacaggaaccgaaaaaaaataataactaaacaatttgttcaatttggaaggtagcagtagtgttgatacttgataggcatacaacatagacagtggattttagatgtgaacctcgtatactagtacaaagtataatgctgacggtaactcgggtggtgatcggcggccgaaggcccgaggtccaggtggtgagttagaataaaaccggttcaaggccgaccgctggaatcaccgcctttgtgtttatgttgctgtggtaattccaatacaatcacattgttttttttttaatacattaggtataatggtacatactcctactccgtactccgtgtataattacctatgagtctagaacaagccttggagaggtccgtgggcccctggacccctggaccgaccgtggacttacccgttagtggggccgcccagccttccacggttgggacgtaacttcccttttcgtctgcttgctttctctattctttcccctccccctttctcacacacgcacattctctctttccacagattaaatgcagatataataagaagaacaacacgaaagagaggaaggaggataaattgtcatggcagagggcgattctcctatctcggaccccggaacccccggaccccccgggatctccttctcaggtgatcggcaggcgcagaaacaggctagtgaatatcataaagcaaaatgacctccctcaactccgtcgattcatcgcctcatgcaatcccgaggatgtgatcgcccctgggacaccctacttagaggacacattgttcaatgcagcctcgtacggcagtcccgaggctcttcaaattctcttggatgtgtatactacggccccggaagttgtcaagaggttcaaccccaagttccgtctgctgctcgacgcatgtggcgcggcaaatattgatgtagtgcgctttatcttggacagtccagaaaatcagttacctctcgggacggtggatttacatcagcgagatgattccggagatacgccgatcctcgtggctgcgggttcgctgatgtatcttgataaagacccagatgaagtagaagatgagggtcttcattgggctgagtggattcgggatcggattgcgcggggccatgagttgattcatcttcttctcgaccgaggctgttcagcgacagatgttattcctcccttgccaaatgatatccctccctggggaagtcaggtgcaagatagtgtgcttgggcttgctgtgtcgagggctaatgggccgttaattcaacggctcattgactccggtgccgatatctaccttaagcatcaacacttccatcatgccagggcaccgttccagttcaggaccgcaaagggtcacgcgtatgatgtcacaacgctccatctagcaagtctattctacaatgctgatgttgttgttaacttgctcttggatcatcaacattaccagaacaataccaaccctgacctggcttcctcctgtgatagtgatgggcgactcccactaccctgggcagctagcggtcctggaggtttttactgtagactcctatataagcagctcggaatcacagagatccttcgactgctcctcgaccatgattctattcgtatcaaccttattgacaacgctagatccacgccgctacactatgctgctataagccacgctatgtgccagcacgttgagtctactatccgcactttactcaaatacagggctgacctccggatccccggcagctctggctgtaccatcctacatctattaggataccactcccatcaaggtgaccctatcaagaccaccctcctcgatttgctcctatcacacggtgtcaatatcaatcgtgccgagaacaagggaaagacggaattgcacgtctttgcccagaatttgcggcaggtctcggcggcaaggttcgtaattgagcaccaggcggatttccgcgctcggaatgctttccaggagacgccctttcatgccgcagcgcgggggtttttgaatgatcatatacgatgtgatgggagggataaggaagtgacaactgcgaataagatcaggcttcaggatgagataatgcgtgttctgaaggaggctgctggggaggaaactgctatgttgatgggtcaaccaaatgcggagggtaaaactccgcaggatttactggaggagaccagaaatcggtggcaggggacggagcagcgcataccaggtcctggaagaggcagaggcagaggcagaggcagaggtagagggctgccagtaggagcataatgacagttcaggaagaatatctatctcataagggtagcaatcgtagcatccacggaccaccagtacatagaaggtcaaattaacgttcaatttgaaagtgttacagctatgtagtttgtatcggactgaaatacgaacaatatctttgttttatacataaaattggtgctgtccgcgctgctaaaggagataccaatgaacacagatctatataatccaagggctaatctctgggaccatcggcaaaaaccgggatcggggcggcaaaggctccacgaaatttgttaacgaatttactagccctgtttttctaattctctttttcattctttcgccaatggcccggaaaatctcaaaaatcgcatcatttcctgctgcagagaggggtaagtacagttcgtcagcggcgtatgcccgggtgatatcgtcatcccctcgggcacatggatgggcctcggtatcgggctcctcgggtccctgcgtcccccgcattggtttttttttgtgcaagttctttttttcccttcattcttttgactgaagtcttcttccaagaggatggatcattctcgtttgaatcgcgcatgggatttagagcagttactccatgcatgcgacagcgactttcgtggactcgacgcgcgacggatgcaagtctataaggactcaagcgcaaaatatcagtcctatgtctattcattgaattgtctggtctctactaactcattaatttgaccggaaagcattaaattcgtttcatttacatgagcaatgtattaaccttccgggctatggtcccagcgcagaacaaacttggcttcgaacgaaacaaaagcgagaaaagaaaaaagaggtatgtatcccatccgcacaccggcggtaaaaaaagcacactggaccattccatcaccgaaagcttaccatctgatgagtttacagaaggtttactccatggtcagaccgaggttctcatcggcgggcaccacacgaacggtgttggtgtggcccataccgccacgccatccctggacacagacgatagagtcacccttgttgatgattccgagcttgagaccgtggttgataccccacttgaggcgacggtcgacatcttcttgccagatcttgacgttgaaatcaggcttggtctcggggaagtagaacggccacacaccgcggtacaagtgggagtactggaactgttgtcagcaaagaacgatacaattcgaacgatacaattcgacttacccgggcagcggtgtcattgcgagtaaccatcaggatggggcagacgggacgatacttcgacacaaggcgggcagttttaccactatgaacttgttagtatgatcttcatacaaaatgacaggaaggttccggctacctggtggtcagaacgatgatggcaccggcattcagctccaaactggcgctgacagcggccatggcgatggactcggaggtttcagtggggcgaggggcaaggttgcgcagctcgtcgaagacgttgaagtgaggaatggcaacctcagccagcaagcaggtctcggacatcatccgaacggcctcgcaagggtagttacccttggcggtctcaccagacagcatgacacagtcagcaccgtcgagaacggcgttggcaacatcggaaacctcagcacgagtggggcgggggttgtatgtcatggactccagcatctgggtggcacagataacgggcttgcccttgatgttgcacttggcgatcatcatcttctgggcaaggaaaaccttgggggcagggatctcgataccgaggtcaccacgggcgaccatgacaccgtcggtcgcttcgagaatctcatcgaagttgttcacaccctgctggttctcaatcttggcgatgatctgaatctccttgccgtcctcgccaaggacggaacggatgtgctcgatgtcgctgccgcgacggatgaatgaggcaaagaccatatcaaccttgttctcaacaccgaatcgcaaatcggcaatatccttctccgagagagcggggaggtctacatcagtgcccggcaggttgacacccttgcgggatgagatactgccgtcgttcaggcacttgaccttaagggtctgcgcatcaacaatctcaatcacctcgaatgacatgatgccatcatcaacatagatgagcttgccaggagcaatcacattggtaatgttcttgtagtccaggtacctgtcgtcacacagttgtcagtccacatcacatgtcaaactcgacattgagggactgtcggtccattcttcggaatgggaatgatcttacatgttcttatcgtcagaagcagtggcgtacgcctcatcagtggtgatgttaagcacggtgccctgcttgatggggatgtccttgtcaccgggggtgttaccggtacggatctcggggcccttggtgtccagggcaatggcgagagggcggccaatctggatacgagcggcctcgcgagagttgtcaatgacagattggtggtactgcaggccaagtcagtgaaggtcttcattcgggtgttgattggagatactgacctcgtatgatccgtgggagaagttcatgcgaacgacgttcagaccggctatggccatgtcagactaactatccaaaaatgctgcccatttccatcggaaactttattttcatacctgtgcggagagcattgatcatcttggcggagttcgtcttggggcctgatcgattggctgttagtaaccggtgttttttttctctccaccagaacctccctgataggttcggcctgatgttttctttgacataccaatggtacagatgatggaggtgcgacggaagttcttcgcaggcaccatatcggtgctgagcttggagtaccactccagcttcatgcggttgctcaggtggtcgagggagtttgtaaccgccattttgagatgatcaacaactgttgaattgatgtagaaaggatgagggaagttctgatcaattgagaatcagggaggatgggtagaagagaaggatgagaaatggaggggaaagagaaaacggatgggtgcggggcggtaggaaaaatgttgcccgccggtgtgagtattggttccatccccaaaacatttttttgtactattgcgaccagaccatatctttctaccaaattaaccggtgaattctgtgacatatgaggatttgactgttcttatttctttctatttgttcagctatattctctatttactaaaagctggaggtgtggttagaggcggcataaacagtccaaacagaaaaaaacaattatatatcaactccggactgggctgaccgcaaaaaagcggaggattaccccgtgctggcctacgcgctgtagattggagtccttggagcgagtaaatgtgacaaatccagacacccaattgatccaggccccagctcaaagaccccagagggatttcggtgggatgagaacgcttatcgatagaccgaatccggactagtgacaatcttggcctcgatccggccccagccacaatgtggattatgtcaggtacaaccagtttcaccagcctcgtctccagccactcgggagacgtcatgtgaatatccacgtgaccgctctttaggcggtcttgatgcctggtctcctcttactttcgcctcttaagcttttggtaactcccggttactcaatatccacagtgttgacacttactactcggaatcatggtgagtgacatttgctggccgatcctggacaaccggggtcctcggaacatagagagcatgccatggctgactcggatgtgctgcaatctagttcggccgtcttacccactacgcatttgatgcggttctccgtgagtcctctaaagtgtccatattgtacctccgaatacagactaaccagtgccttcaaccgcagtctccgccttcctcgcaggcgtcaagcgctccacgggcctcacgtaaatgcaccctacccctcacgatcgtctttttccaagctattgtttattctgcttgttgctcgtcttgggtgcgctcgatatccatgagagaattcttagctaactctattactcctgcgcacccccggttgggtcgtgtgtgcgtgggaacttcatagccccagcctcaattcagacaagatcacagacaacaaagacatcaagaaatgggttgatagctaccttggtgttggagagtggatgatggaccaatcggtggctgttatgggctcgtccgcctggtttgaacgacgccgatgattgaccccgccatactcgacccggagagacaatcggcgatccctttctcgcgacttgactttcggccgtcttgtgtgtatgattgcggactagcggcacatatctggccttggctctgactcttggccctatggcaatgtgatacaatatcagtatgtacagactgagtctgtgttgtggctgtgtctctttaaatcaccggcacaccacaagtatatgctttaaagccgaattgacgagtgatgaccaatttttatctgcgctctagcctccactttcgatcggtgcttatatggtcatggtgttttgcctgttttcgataccttttatctttctgcatgtctatatcatcacacaaatccagccatgaaattagcagacaattcttggaatattctccttgtaggtatgaacataagtcacgggcttgtcagacggtgctacccggatagctcgaggtcactattggtgcatacctaggtggcactgcatgcctgaagctgactgctggcgagctacgagagtttcgttgtgaactacatcgtacgctatgtgaactactgctgaaaagaccaggtttcacccgcaggagactagttaatgattaccgcgggacgaaggtctatgtcgatatcgtggaccttgctgggagctcatctttcctcccaagatggaggctaaacccagttcacgtatcaatcacaacctaaacaacttgataaacgtaacatggaaacaggggggtattttacaaataaaaaacggaatgaagtaaaacgagaaccacaaaaacatgccagtcaatcatacaatacgtagttagagagcgtcaatgtccacacggcggtagtaagagacatggcccatttccttccagtaatgagccatgtggtcaggagaaataaggatcagttgggactcgatgtaggtgtctggcaaattacatgttagacaagaccgttatggtgtatctaccaaggcagcttaccgtcgtggaacccaagtccagcgacatgaccgcggcaacgcacaatccgggcgccaacaaaaggctcttccgtcccgatactaataaagccgctggcgccaatgtcgtcggcaacaaatgagtactgtccacgaggaacattggggtcacctgtcagcttgacagccagcagcggacctcgatgtctaacatcctcctgggcgtcgattatcttcgactcgttttcggaaccaggtgctacggtcgttattttatcctgggagacaagcaggaattcacatccatgggccgaataatctccaacccaaatgccctggtagggtttcgcttcggtgggggtgtaaaggacaggatcgagagttgagaaggttagacccggttcgttcggtgccggagacgtaagctcttggtttgcccacttcctgacacggaagaaagactccgacaaatccgataaatatttcggtattggcggggacgagtccctcaaatcacgaactgtacgtgcattggtctggatggttcgtggtggccaaagcacatagggtttgaccctagattcgctatgtttaaatgaagagcaaagagacagcgaggtgtacatatgtcgggtatccgaatacattggcatgtggcgctctggcattgatttaaaggattggattggagctgttcgggaggacggattatggtcgctgagaaacaagactggatcgaaccccttgtatacactgggttcaaaagactggatcataacttctgggtgtgatatccatgtttgaaactgaggaaagccacggtctgcaaagaccggatatgcttcaatcacaccccgacgattatcatatcgagctatgattagcatccctgtgtgctccgtgtctgcgaaccagatcttgtgctgaggaatgaaccaataggggtgatatgcaagataaagtcggcgaaatgactcaaagggacctgagttctggataggagtaggcagtctctcgttcaccaggctagcccatagtaagtcattcgatgcatgatcgacgagggcccggcaagtggcaccgaggcaacctagatctggagctgagagataagatgcaatctcatgaatgagttcagcgggtaatttctcaaggaacgatggagacagttgctcatcattaagtgaccggtcgttggggccatcgttgctttgttcctgcgacatgaaaacgtcagtacatggccgtccacggtatttccaccagcaagaattagacatacccggctagtacgggtggtaatcgccatctttccttccgaggcttgattcattgaggtttataagagagagatgatccaaagtattgtaaatgacatcactgggaaccccagagtcgcatggagataagaacattggaaaggggatcgaaccagtcacaggaaagactaataagcctaatattgccaatacagtgactggacataagtttttgcacccccgcatactcaccgtcacgatagactcataccgcctacctaaaaggcgtaatatatagatttcatagtatgaagtcatggggttttggccggcaatatattatataatcatgggggtgtggggccaggagtacaaatacttatgtccagccactacggagtatgttatctgaaagctgtgaggcgccaggtcaatcagaaaagaaagagtggaaagcagccttgttataaagctgctaatcactttgtctgtcaacgttgtaagcctcgaacgtctagctcagctagctaacaaaaaatatatgtagcaaacaatctgaagtaaacaattgcaaataataagcgagcaaaacatgaagcgtgtgatagcgatttatagtagatcgtgacaaaaactgcctagctttttaatctcgtatttggagctaggacatttagagcttaactttctctagccgctatcttcttaatggacttccggtgaatagattatcgtatagcatataaaaaataatctatgattcctacagaaaacataaaatcaacttaacttggtgttattgcaaagcgataaggtcggattgaatcgcagctgattttcacagcatttaagaggagagcctaggaaagttaagagtactggtaaatagaacaagaacataggatttcttggcacataaactagggttaattcccctccgtactaatctgcactctagaccccttgaacgcgttggtggctatgtatgtgtagatgccaagaaacaatgttgtcagagtcagccaataacgtctctacagcatagtacgtctctacgccatagttcgtgttcgactgaaagggtcagcgcgaggattgatacggagtatagaggttgagcctcgaggttgagcgatgaataatgcctggttcccacgatattaatagtatacttgtctaccttcacctagccatactgtaaggcgatgctcgtacagttactaatagtaagccatgcttgcctgggcgcccgatacagtacaacagctaccctatccaaacctaccctatactgtgtcccataacggagcatatcacgtgaactaaatatcacctgaccacccaaacaagcgtcttgtttaccattgcccgaacaggaaatatccaggaacgcgcctgggcccctgctgcctaactacaatgtatagagccccactttgtttgtttatttgtgatctataacgaattctctttataagcctatccctgcgtacacttttattttgtaaacgctttctttgttttggccttattattccaatatactctccttatcaacatggatactcggtcaggaaggaaacggaagagttctctctcaaatccaagccagtcaccagtctcacgccgaactaggcagagcttggcagtggcacaagaagataccagtctcaatcaacaacaaaaaaatgtatctgttacacccaagaaatcaagaaagagagtccggttttccgacccaggtcctcggttattacatggtgaagatattgggtcgaccggcttgactccagcgatgcgtcgaacatcgttcgagacagaatctggggatagcacacctagccgcaaatcccgacgcaggtctgccccaacaccgcgctttcagcggtcctatgacccggaggagccgtttgatgaaacatgcaccgagaggaggatccaatttaccccgctacgccaaatcctcgacacacggacccagagaagaattaggcgaatcgggttgagtgatgagatcaatcagattgagcgcgaaaagcgtgagacgcggaacatggaaaagaccatgcgagctttgcttcaagagcgagattctctgaaagatgaactcagggccattaaacaaggtggaatgggcttggaggaccaaagttcggtggctgagtcttattggatgacgccagagacacctagattttgcgatgaagtatcggtagtttccagtcacagtctggatgacgccgctccatctacaaacagtgaagaggagacgttcatattcaatgacagtgctgtcattgtgtccagctcccctgatttccgtggtatcctgcgtcataatccaccggtcactgatagcttgatgctatccgacgaatcacaaacgcagactgaagtcaatacagaagaatctgatattcgctccctgtcccttgatttagaggctgccaggaaggagaggaaaagcttgttcgacgcatgtcgatcacgaatctcagggttcaatgaccctacaatcagtagtcttttccgccagtcatctccaccaccgaacttcttcgagaatatcatggagatcttagaaaatgctctgtctcgtgcgtcagatgctgccgaggctcttgaaggagtcacccaagaatgcaccggcttaggattctccggagacggcgtggacgatgtgatagccgacatgcggaaccacttccgctcagctcgcctcgagcttgagcgtgcgctacctggtgagactgccaacgttagccttgacgacggcaaggcaaccttaggtgcgctggtgaggcgcgttgagtcactggcaaaagatctagggacggagcggcattatcataacggctctctgggccgggaaagggctctcagagggcaatttgacgccttattacaccgatatgagacagctgcaagcaaaattgacagtcttgaggagtcgatcgcatcttctgcaagcgatatgctccacacgcggatgcgaatgcaagaactcgaacgcgaagggcaggaacaggccgttgggattgacagattaagttcagcccttgacaagtacaatcatgaagtgaagggcctcgaaggtcttatcgacaatcttgaaaaggagaacacagctacaaaggaggactacgcccggcagatatctaagctcaaggagcaagtggcccatgaacgttcaaagcgctgttcggcggaggctacggcttctgagtccgagtcccgtattcgagaattagagaaaacagtcgagcacaatcgcattcgcgcttgcgacttgatggctcaggtggagcttttcgaaaaggaacatcaaaaagccatcgagagccttgagcaaaatgccagtgagcgtcaaacacatgaggcagagacagggactctcaatgttcgcatctcagacctcaccacatcattgcatgctgccaagtgtgaactgcagcgtcttcagaatatcaacaccggcctcgaagaacagctccagctagaagtcgaagctcggaatgagctcctagataagtgggccgcagagcaagtgcgatcgttcgcccacatgaaggagaccatcaactcagaacgtcgcaaagccaaagttcgcacggccaattgggaattgaagtcggacgatctcatgtcagatggcactacagtgggcggtgggagtgaaccaatcactccggttagcgcccgatttgttgatatcgaagttggccgtggcaaggataggcgacgtatggatattgtcaggatatcggccgagggactggaggatggcatttcgggtgtcggcagcgatatcggatttgatgttaccgccggtgatttggcttaatttttgtatacgacctcgattatttatttatttacatgtttgttttgggtctcttcaatttctccaatttcttcaactttcttgatttccttcgaatgatatccttcgaattatcttcatcttatcttcatccaagcctgcagatgtcatacataatagccaagtctttccaaggttttggttttgcggggatcgtctatgcccctgtcagggacaacccggagatacgattgttggacggctgatatgtggagcttcaccccctctcttcggagctgatcttatccaaaaagaatggaaccgttacgatgctaagttgcatttaatatatacaacagcaataatctcaacaatctcaacagtctcgagataacaggaagcgaactcctatatatttgcaggctgggaagcccccaaaatattcctcatgcctcctcataccattcaaacttcacgatgagactcaagctttcagccatttccctcattgcaagctgcggctcgctgtgcagtgccacagaccgtgtcctcaagcatggctctcctgaatcagtgggacttcttgccgagcctctcaaggagatgccgctcaacttgagccagtacactgttgctgccaattatggagcattcacctacgatttggttcaccccgtccagccgggaggctccgttgtcgtcggtcacaaggccaccattgtgagctccttcgctttcggccatacgaacatgtatgcagactccaatggcacattgctccctcacgcaaagtggaccccgaaccacatcgacaccatctacgatatggccagtctgactaaagtgttcactgcggtggccgcattgcgcgccattgacgagggcaagctcagcttgtacagaaccgttgcctcctatatccccgagttcgcgaccaatggaaaggaaaacatcactatcctgatgctggtgacccacacaagtggcttccctcctgaccctctgcccggtctgtatgatccatcttacacgaccatgcagcagcgtgtcaatgccgtcctcgagcaagccctccaggatgctcctggatctacctacacctactctgacttgaacttcatgaacctgcgcttcgtgttggagaaggtcaccggtaaaccattcgatgagtatgtcaatgagtacaccagcgagctcggcatgaccagcaccttcttcaacaagggaaacaaccagtccccttcattccattactactcgcgcatggcaccgactgagtaccagatcgaagttctgggagacgacgagcccaagcgtcctcagcccgtgcgtggaaccgtgcacgacgagaatgcctggtctcttaacggtgtgagcggacacgccggtctcttctcgaccgccggtgacgtggcaatcctctgccagatgatcctcaacaacggtacctatggcggcaagcggatcctgaagccggagactgtcgacttgatgttccacaacttcaacaccaaattccctggtgatgagcacagtgtcggcttcgagctcaaccagaactacttctccggacccatggccaatatgcttgctggaggccacactggctttactggtaccacgcttgttgttgatcgcgcatcggacaccttcatggtcatgatggcccaccgtgtgtatcccagccgtacctggtcgagtaacaacattgttcgggaggcggtaggctattgggtcgcccgtgcgcttggtcgggatgttgccttcccttgattttttgtgagatgaaaattatctaagttgactggaacctactgtaaatcacaaagggggaagaggaggaaaacttgtgtatagttaaatcgtgtgtttagaataatatgctcaatgactatttgtcctaaacattaaaatcaaatggtatatctctcggtgcgtaaagcacaataaactcccaaacaaacaaacaaacaaactaagcaaattgcaaagcctactcgctagccatagctttgggctgaggctcaatgtgctgcttgtgcccaggtcgagcaaaaatagccccaaagagattgaaaaagttattacagcgaagtaacatgcaatagaacaaggtgacccccgtaaccataatctcctcttgtgcagctctgtcatctgccttggggccaacaaactcaatcttgccaaggttggtgataccccagacgttggcagtgaattttgccacgggcatctgctgctcatccacacagataaagtcccaggtcttgaacccggtatcactggtccatgtcattgtgactggggtttcagtgtcggagaagttgagtgagcggtgggtgtacaccgtccgccagcgtttctgggctagaaggtgggccttctgtccgcgtagttcgtagtcggcgttgatagagaccgcgttcagcttgccactgccgatgacttcgttctcgggggcttttttgaaaaccatgttggctgtgagactgaatggggaataatggatggtgtataaggggtctgttccggtgttggcgtcggagataatggccttccacttcttccatgtaaagcttactgtaaaagcagcgctcttggagagactctgggtgtcttggggaatattggatgaagacattttgtctgagtcgactggattcttagaagtagaagaggttaggatgggttgatggatatcggttgaagccatagattttgtttaacaaaagttgatgtttgggtttttattgatcttgtctttgatctggaatgaattaatcctttagaggggagatttcgaccatacttatataactcgtctcatctggtgcccagaggcgcagagtcttggcatctccactcatttaggtatatcgcactaacctctttgggtgccatgtaccgctccagccaatcaactttgagcttggggattctccgggggccgtgatgtcattccaacttgagatttgggggccagctgggcaggggctgagtgtctgcatctgcaaagtacaaagtacttagactaacaaatagaaatacttgtgaagatcgtaatgtcccttgtacagcgcaatgttggctgcttcaaacagttctcctcatttggggaagatgcatgctatcttacctagatcaatccacttgaataccttggaacaattagtagacctgactgatagtgttaccaagtattacccatagctcttcggagccagagaaatagctggctattgttatctatgtaggcgtagttgtaatgagaacgcagttatcaatatttacttggttgtctttgagaacgatgacgttgtcgggcgtcaagcatataaaattaacttcattggccacacttcaaataaactttcttcaacagcttgttaaaccgtggaattttcttcgaggaagtcttatcaacacacttgactacgcaccccaaacatggttagccaggacaccaatgcacacaagttccgcttgaaggtaacggcaggcgcagactacgaccgcaagactcatcaattggtacctgtaaatggcgagacaatccgaatcgaaaacgagcatgctattgtgagtctctgcgtacggatcaagaactacacaggtaatacccctactctcatctattcggtcaaagagcggagctcatcggtcaaacaggctatcctgagagttcaccttccacaagcccatactttgacgatcccctgcaccaaaaagacctatattccatatgcttctcaattatcttcaaagagccggtgaacggcaacaacctttacttcggcaatgacttcgatcaccctgtccgcgacttcctacctccgggattcaacacagcactacggattgtcaagtggaccctcgaccctggcctagacggcgatgtctacgctgataagccgtatctgtacagcccggcattggcatcgtgggaccagttccgcattggagataaggtgcggaaatccgacgaggtgccaaagctcgatgatgagattattgaggagggcgcttatagcaaagatgctgccagtgtgcgtcacaaatttaacatccctgatacagtcgagggacgcagaaagtatttccaggacgaggcgaataggaaggagtttgaatttgaacctgggaggatgtatgttgctgatttcggaaatccttatttggcattcgaaggttagtgagatgcagatttgctcttttgattgggatcatcgactcactgatcatattagacttctctgtccgtcttcctggatttgatctacctatcatgaagtacgtggatgagaagaaccatgagctgcggtatacgctcaaggatatttcaaccggacgcgtgtatcttactgtattgttctcggtggtcctacgcggaacggaagacgagcaagaccatagtaagagtgagcaacgtgacgacagtctagggaagtttgactgggagccggagccatcatctggcgatgtcgagtgattttctcgatttagcagggtatgctgtagttgcatgcaagaaaaaacagtaaattcgtctcaagtatcatgcaaactttgaattatatacagatttactttttacagtctcttcaggacatcctccaaaacctgctgagtggtagcctttccacccatatcgggggtcaggaactgagcagcatccaggttaccatcgacagcagcgtagatctgggcagcagccttctcctcgcccaagaactcgagcatcagagcaacactgcggatagtagcaatggggttggagatacccttgccctcaatgtcaggggcactgccgtggcagggctcgccggtgggggannnnnnnnnnnnnnnnnnnnnnnnnnnnnnnnnnnnnnnnnnnnnnnnnnnnnnnnnnnnnnnnnnnnnnnnnnnnnnnnnnnnnnnnnnnnnnnnnnnnnnnnnnnnnnnnnnnnnnnnnnnnnnnnnnnnnnnnnnnnnnnnnnnnnnnnnnnnnnnnagggctcgccgatggcgaagccatcaccaacgttggcactggggacgagacccaagctgccaacaagggcagcagcaccgtcggagaggatgtcaccgtagaggttaggggcgacaatgacatcgtagaactcgggctggcggaagagcttgtagaccatggagtcgacaatctgctcctcaacgaagatggaggagaacttctcggcggcgagagcacggcgcgcggtctcacggaagagaccgtcagtctgcgagagcacgttcgacttgtgggtgatagtgaccatgggctgggcacgggtagaggtggcggcagccgcgcggatgctctggcggcggagtgcaatctcaccggcgatgttggcgatgcggaacgaggcatgctcggaaatacgcttgatagcctcggcaaccttgccgttaggggtatcgatggtgcgctcttccttcacgtacaagtcctcggtattctcgcggacgatgaccaagtcaatgggcttgccgttgctgttgccggcagtagtcttgacagggcggacgttggcatacaggtcgagcttcttgcggagagccacaatgggcgacgagtagccggcgaccttggtgctaggggagctttgggttggtagcaattgtcagccggaattgcgcatgctgaaagaatgatatcgtagcttacctgacagcaccaaagagagcaccgtcacactccttcttcaaggtatcgacagtcttgtcgggcagagcggttccagtcttctggaaggtttcgtatccagcatcgaggtcgacgaagctgaacttgaggttcagggacgcggggagagactcaaggatccgacggccggcctatattccatcaagcaactccagtcagtgaatcgcctcgcatatcagatcttgagtgttacccaccgggatgacctcgcgtccgataccgtctccggggatgagacctataatattccgatcatgtcagtcaattgccgagccacgagatcgcaaaacaagggcgatcgtaccaatgcgaagtgtccgggcagcagccattttgatagacttttttgcagagttgctttcttgaaatcgacaatcgccgtcatcggagcttttgattttgtatacggctcggattattgttgatccgatatactccggagaaccccatacgaagtgctttagagactcggctctctagctcacattcaataaaatgctggcgatggaacaagatcaaaaagtaatgtgtgtctgcttgaatattgagttcaagaggaaatgatgcagtcacctgggaaaccatcccaaggttgcatggatatgcgttcggactacccaaacgggtgacatctcgcgaaattgaatatggacaatatcttcggaggttctttgatggcttcgccgaactttaaactatccattttcatcgtgctgctcaatcttggcaggtattatcaacgctaaacccaaatgggtcacttacgatgtaatgaacatacccctcatcttctccaagcgcccggacaagccgaacagttgatgaagagttcgcgtcaatcgggggtagtgtaagcccaatgacactgtgcaacgaggcatatgcaagcacagaggccaagtcgcgaggtctaaatattagaataatcatgacgttctgcaatgcagaccattcagcgattaaactgaatagaacagatactacacttgatctaagccagaggcaaagagagctgaagaagaaagaaaagaagaggaagttctgggggcagggtcaccttatatgtatcctgagggcggtcggtttatgccactatttacaaatgagacaaacaacgacatatgctcgcttaattaaatatgtaagtggtaacgtgatgatcaagacaatcactgttgatatcaattagatggctggacataccataggcgaggatatctctttgatatgttacttattggcagtgcacaggcacacgatgtgacctaattagtcacttataaattgaaccccactctcagagtaaatattcaaagcagtgcagatggcacttagtttctcagattgtattcgatttcgatcccgtgcttcatcacccaaacttattgtcaactctttcttcgactccaggactcagtatggcattcaatcttatgtcccattcgttggattcgccaatctcaaccgggaaacggaatattgccatcgcagaaattgtcatttattcccttatgcaggcgatactggcaccataacaagaacaagagtattggacgctgtgtgttctattcttggtgaagtatggttggtctgctgtcacagagtaagtggaagacgtcccaactatttcaaaaatatggccattgaacttatttatagttcgcatagcgggctcagccttggttcttgctaactcacacccggagaagctaatgctcattgctgattcaattttgcaaagtacgggcctttcacccctacgagggcttgttattaaagctgttgatatagtgtttacttgtcgtgatggtccctaaaagccctcgtacacccgtcttgtttgaagttagcttggttctattgcgatatttcataagcctggacctcgcttttcttctgggaaaagactgaatatactggcaatatttgtctgagtagtggacaaaatggaccaagttgacccggtttgctctttgctctgtatttcttccgtttcccgagttttatcgccatcatgctagcagtggtgggtattttagcatggatacaacccactcaccttcactcgtttaacactgagcagccattgctccgagcacgccgacaattatgaatcataggttcatattaatccaaagaagccaagagagttggagaagactcatatacaacataggatctggtacccgtcacgtgctcccatcggacatgccccgagatcctctcattcgccaaaaggaaggtggttgcacttctattattggccttttctcttgaactaagatcaatgcattattgtgatgtacatgatcgatctatctttcaacgttaattgggagactgtatttcttggctatgctattataccttcatataagttcaatattcctctaaagccgggtatactgcaacacacctggacatgccttggctaatgtatacctcgacacatggagatactggaactatttcgtgaataggagcaaattaggaaaatagtgcatattctgcctcaggcacactatgccccttactcaagatgaatatccacttgtaaaggtgttcagatatcgtggcatgtttcagacctcacagggggtccctgtctccgtacttcatactccgtacagcaaattaatgtactcagacccccagaggatgaaatcacctgtcacatagaaatgaaagcccctgagacagggagttatgtatggagtaaggcgttggcctattggatgcgctagcctgaactagcgcgtatgtatgtaatagtttttggatcggcccttcttcacaccttgtacctcttgtccttttgtctcataccaattctctatccgactttgacgcgttgaacccgaaccctcctgggaacatgcagtggtatctgcctgtatccgattagtcgtcacaacaatcccgtttcgacctgatttcaggagcacccctgtgctccgcatacgcgttttcagattcccctcgatttgcatacccgcccttgttcgactgacgtacgctcaataatgtccgataacaatccccatcaccctggcgtgcgcagcttgttagccaagtttgaaggtcaaagccccatcgcctccccgcctctccgtggccgatccccaacttcctcagactcgtcagcaacagttcggcagctgtccaaggtccgggctagctttatcactgtggagggggtcattcagtcgaatccttcttcgccgttgaggaaaacaaatgcgcgcagcgacagtcctggaatgtttggaccgaaaatcaactcggcggatgcggagtcgggacagcagggcatgatctcccccaccgcactcagtcgcctgaaccacacagagaacgcgactctggaacagataatggctgagagtcgaccggcggagtctattgaaaccaagcgtgaacggaatcggactgccaaggaggaacccgcggcgcgcaccgagactgaagttcggtcgcgaaccagcccgcgaaagcagacaggggggtcaacctccgcaggttccaagtcaccaagctccgatactccgtcgcaaaagtcagattcatcagtagtgattaagaggaagccttcttccgttgggtctgcccgcaatgcagccagaaagtccgtgtcaactactgcagcttcaactggtgcgaaggctgcttctcaccatgcaagccccaagcccacagctcgggaagtggctaaagagcgcgccaactctctcgcccacaagcccagtcgtgtctcactgaatcccaagccaacaacagcacggtcaacccgcggctcagcaccggcacaagatacttcaaagcctcatgccgcaggtgtatccagcaagccagtatccaaatccccatcgaaacctgcgcgtgtacccggctcgatgaatacgtcaacacgcgcgtccaccgctaagccaggaagcacagcggctccgagcgctcgcactactaccagtgcatcaaccctcacaagaaaaccttcaactctcaaaggcgcagctaaggttcagtcgcgtgccactactcctagtgccagcgttcacagacaaacttctcgcccttcgttgtccgctcaagcagctagtgatacaagccccaaacatgtcaatgagggtttccttgcgagaatgatgcggcctactgctagctctgcgaacaagacccatccccaggaaaagaccgatgcaaagcctatcgccaggacaacctctgtttccaggtcccccaaggcgtcgtctgggagggtgccagatcgtggcgtccaccaagtgaagcctaagaccaccgcccttcgatctcagagtcagaaatcccaggctctgaacaaggagactgcgccaccgaaagatggacagaaaccttctcaaaagaaacaggagattgagaaagagaacattgtggaacctgaaaccgtgaacctcgctgcgattgcggctgtggagactgcttcccctgctcaggttgaggagacagtgaccgagagttcctctcccatcccagttgaaaatgctactgaggtgccggccgaggtcgatgctcccgttgaggcccatattgagcccatcgctgaggatgctgaggaggataaggctgctgaaaccaccactacaaccgaagagattgcagcagagcccgtggcaatcccaacggctgaggatcaagtgaagatcggcgagaagcaagaatccatgatttccgagccagagctccaaatcgaggctcccgaaaaagaagatgatgcgccagtgaaggaatttactgtccctgaagctttaacggaggtcgccgagctcaagtccactgatgagcctgcaactgaggctgaatcgagcaatgtcgccatcgatattgccaatctggcattgaactagacgctctgaatccgaactgcactgcgttcatctcaaatggatttcgctggtccatctccgcttctggtaaagtcttggaataaccttttaatcttctccgataatactcctccccattgtcttctatctcaccaagcgtgagcccctttccattcgtcgaggcttgccctcaaccttttcaccatctattcttccctgtctatctcttactctatgctagcattttcacatctatcagtgttttgggttgtcttgttatcgtttgtttatctcttgcatactctgtaccaatttcttgagcatattattcttagcgcttaggggcattatccaatttagcatcttgatttatcaatctagcggggctcaaagctttcatactaccattttgacggttcttatttagtcgcttcattttctcatcaaattgagaagctagatgatattcccacagtactgctcaacagctggcctagtaataacaagcactcaattgaccttgaccagcagagatctcttgaaaaataaagatgcagattctcaaactcccaattaaataaaaggctcaaagcttcctctcaagtttcttcaggaacctattcacaccaccttccaaccgctctgccctgtcctccaatttcctcggccgctgtccaggattcttcatggccttctgtgcatatttctgatagtgagagttagcctccacttcagtgggtctgtataattggttatggatatcatattcggagccgaaacgctggtgttgttgttgttgctgctgctgctgcgcctgagtctggtcataggaatgatgcgagaacccgcctatcggcaccgtcggtccagcctgatattgaggcggcgactgggcttgggcagccccatagacgtgttggtcatagagatgggcattcgggtcctgcggcggcggagcgaaggacatggaaccttggcggctggaactgtactgttgagctccctgtccgccaatgaacgacggcgagtatgaaggcacaggcattcccgggctggagctggcggtggagaaagagtttgaatgctgtcccacactgggcggaggtgaggcgaatgatggagggcctgcgtattgcaaccccggggttgaggggggcggggacgcgaatccgcccacgactcctgcgccccccatcatttggtgcgggggcgtatatggcatgccgctgtcggctgccactgcggctgcgaggccggtgccgctcatcccgtcctctggcggcggggtcttctcgcggtgttggattggctctggggcagctggggcggctggattgtatgggagcggggcaaagctagctggttctttcctttcctccgcgggagtagaaccagcgcttagttgttgatcaactggaggtccgcttggaggaggtgggggaaagctgatggtctgtgggagggcttgtgtcactgatgccgctgtgcttgtaggctcggatcgtgagttgcgtgtttgaccattctggtaggcagggtcggagactgcaacggtttcaagttgctggactacagagctcatagtttgctgtggcagcggttctggctctcggtctgtctcgacctggtcactggatagaagccggatgacagtgtccagaaagtcggttgaatcttcttcggtccagaagtagatatccaatgtatgtaggcgagggaaatcgcggacatctttgggcttatcgcgtgggtctccactaggcagacgccactcatgttgaagggtatcttgtccatattgctgttggggcaagggggtgtgagtatcaaccgttaatgtacaaagtgtcgggaattgagcagaatgtcgtatatgaacattgttcaagcccccacagaatgcatcctgttctggagatccaggattattggcaatttcaacccgggacttgttctgagaagcatcatggtaaatataaacataggagcctttatcaaaacggtggtgatatggtgaaggtcttcgggttggctcagtgaaatagtagtggatatccgcaaaactatctccgccgttagacacaatccgagaactgcttcatatcgatctgcggggaagtcagttcaactcacacagtcacaaggcgctcttcgcccgccgatggtggcatgtctgacaattcaaagtatggaatgcaagtatacaacgagagcagcaagtagttgggggaaaagaaaaagagggacttacctttattatttataccttggactgaggggtactcaacctgtgaaacgccagcatcaaccgccatgcaagttgggcgcttagaagatgagtgtgatgtgatgtgataggacggtacttgtacttggctatcacatctatccgctgtgggcgagaaagtaccggtacctggacaagaccgcgacccggaagtaccttttatccgaaaatttccatcccaaatcatcgcatcttcaatcggcgctacaaccacctcctgccgtgtctttgcttccccagacaattgcagtccattgtggtccttttcggtcttccctttcgtgttatctgggatctccgttcttcttctcttccgaaattgttcaattccaccactctctttcctctccgaacggccgccggtagagcttaattgctgccgtcgcgaaatcaagatgtcgctcgtcaacctttctgctgtctgctcccacctgaacaatgctaccaaggcccgtctcgccctcacctctatccccaacagcaacctccacctgaagctctccctcgccctccaaaactccggctacatctcctcggtagcccgcggaggcccgactcctcctccagcccatggcatcctcggtttccctgcagtcaacgatgaggtcgaaggcattgagactataacgcgtgataatgtcgcatcaaggcggctgtggctaggcctgaagtactggcaaaacgagtcagtcctgggcaagatacagatggtcagcaagcccacccgacgggtgaacattgatgtggagggactgcgccgagttgtgcgtggtgagcaatccgggtttgtggccggacttcgctcgccgggtgagagtctgtacctctctacagaccgagggattctagaagctcgcgagtgtgttgagaaaaagcttggtgggctggttttgtgccgtgtgctataagtttgtgattgtcctagtggctaatctctgatttgggggagctacccaccggggagatttgtttctcttcttgcatttactttggagtttgttggttagtcgcagcgctttctcttttcgagattagtctttttgtgactgttgggataatacctgggtcaaggatctgtatattagatgtctgcgtatctcgcattctgtgtgctctgctggtgattttgcagctgtcctcaatgtgacacagtgtatagattatgacttgaaatatgtccgtactccccatggatgtgcttactacaatagagtcgtaatccttctcaggctgattttacagttatactcatgttcccaatatcccaggaatgatatagtgtattaaaggccatgaccaaatcataggcaagaatagaccgccacttgtgcggtctctgttcttcacaatgtaattcaataatcaagtcttatggcaaaagcatccaaagtatgaatatcgacttcactttctattgaatcctgttagaattccgggtctctcgcaagtgtttcgagtctaccggagctttttttttcggcctacaaacactcccaatggtgatccgtccgtctcttgggtaatttacgttcttcgacaattttcatcctttatctcatctcatcttggtcttgtcctctcatgaaggctttgtccccctgacttcagtgatcgggcaaagaactatcaaccatggctaaaccccaaagtgttaaacgcgcgcgatccaatactattggcgatgcccacaacacaacaacgccatcatgggaagaaatctcccagcgcgtccagactctcgacgaacagagtatcgccaatattctcgtatacgcagcgcaaatccatcctgatatcatgaacatggtggaccacgccattcatgtaacccgggagagagagagaaataccatcatcaacttcgacgaggattcgagataagtctggcaactgattaaaatcacacatcgctacgagcgcagttcaaagcagtacgaaatagcgggcgatgtcgttgaggaagtcgtcgataccattgaatcaattgcggaagagtgtggaccttctgtaaacccacagacacgattcaatggactctccgtactgcgcaaaattggcaagacgattgcgctttctaccaatgatacactaggccgtgaggtgcaggaatcgttccaatctgatagctctcttgtggatgcgatgataaaaatcatcaattctatgacagcggatgaagtccgagcgatcagagaggataactcaagtccaacagcattgtggccaaaattacaggaattggaaaagctggccgagaccgaatgcattcatcctggactagaagaagtgttggatctattgtatccgatttgaggatgaagaagaaatggatgaagaggaagaggaaggagaagacgaggacgatgataggaaggagttggacacagaggagggtgatgtctatcaagtgccatgagaggcatctttggaattgacctagatcattgttcaggcatcaagaatatcagaacggactttaaatatgaaagaactaaacacaaatctccgaccatttcagttgcttctctagcatcatgtccaatatcatttgaggtgttcttaaggtgatacggtactgttttatgtcgtatgtagttgtgatgtcgcacagttttggcaatccaaatttcgagtttcccccacaccaaagcctctcaaagcttctcatattctcatcctcaacttccaaaatgactgacacagcgaggaaagtcctgatatctggtggcacgggttttgtaggctcggccgtggtacgggctcttgcagaaaaatacccaaactttatcatcgccgtcatcgaccaaaaccctccacgagccgagcacgtcctgccagaaataactacgtggattcaggtggatattacttcaactgaaacattgagcaaagcatttgaggctgtgaagccagatatcgttatccacactgctggagtcgtcccagatctggccgaacggtttggtcgccgactagaacaggaggtatggaagatcaactttgaaggcacacggaatattctggatatatccaagcacagcggggttgaagtattcatatacacgagcagttgctgtgtggtgatcgacgatacgcgtaccgctcatcctaacatcaatgaagaatggccctcggcatttaggtcaaccatttatggagagtccaaggttggaactaccaatcccatcagcaagattcacggcatcgatatgagatatataactaacacgatttgggatggtcactaggctgctgcagaagcactcgttctaaatgcctcaagcagtaaaatggtgacatgtgccctccggccatcggtactatgcggaccaggagactaccagctattaccagctattcacgcatgtatcgccaaatacgaaaccccttttttgatcggagatggcttcaacctatgggatatcacccatgtcgacaatgccgccgatgctcatatcctagccatagagaatctgctatcatctcgcacggctgcaggcgaggcatttttcattcagaataacgaacctatcgcctttcgtgatttttgtctggcaatttgggcgcattttgggcatgtccctccttttcaaatgcatatccctaagagtctggcttacttcaccgggttggtgtgtgagactgtcacctggttgacgggaacaacgacaactttgagccgtggaagtgtacaagatgcatgcgccattcgatatgccagtggcaacaaagccaaggagattctggggtacgaggcgcgcataggtatcgaggaagccatccgtttgagttgcgaggtaagtaaacaccaagcgtaaccttttctattgccgtactcaccaaagcaatttaggattatgcttctcgtctcgggttcgaattgcctcctcaatagtaaaaatcgaaaaaaaaaacagtaacgtccatgttgatggataatcacatatagtttccggatcaccggcaaatgactagggttaaggacatcctgaaaatacttcgctcattatgattttctggggcttgagaggcgttccttggcttgaatgatctcatcatatctccttttgccgtccagggttttgttgataacaaattctagacattctcgaccttggaagatggacattgatacgaaggatgaggttatcactattgggatcagatctgttgcgacgtcgacagattagaaatgactaggggcatcactgtacccaagcttaacttgtcttcattgaaggtgcctcaacctgcacggtcagcggaaatgatttgtgggacgcgtatcagaatattcgcgatatcgggggctgcaagaagtgcggctcgtttgagaggagtgacggatgtacacttaagattgactatgtttatggatgtgatcaccatacttctaagatggcggttatgaatctcatggaggcaccgaactctactcagagtgtgtctatcgatcagcttggacctggggtggtgtatgggagctagtttgagagttttttcagtattttattgagatgaaaagtaatatgattcatagactgaacctcagacgaatagatcttgctgtgaaactgttctactattaaccctgttcgaccacgatgctattactaattgattcagctctctgaagcacatgagaccatcactaatgtatatttttatgattctctcccccgtcatctgaatcactatctcccaggaatcccaccgggcgtaactgcaattcctacgaagagaataccgaacaaaaattcaaagtatgatctcagttgtttttggctcactagctgttgggaaaatgagatttagtatattttatgtagaagtagccacccaataacgtactcagcatttcaggctcatcatgtcgtatcctggtagcagcgcgtgacgattaaaacaaaagcataatatatttgctgcttcatctcttcatccaacaaaaaataagggttgttgagtgcgatgtggcgttttctctttgttttcaccaacctggaacctaccgacactcgtcgcggactcgtctgggcgtcttgttgggctgcaagggtagatcgcatgccatcggaacagctgagctctccacaattggaaaatccggtatctaacttcgtctctgtttcacccggatcttcagaagagtccccagaagggcgagagacatggcccatgcggcttattgcattgggcctcaaaaagcccgagtgcccaacccagattaactgcgcgcgtcaggatttccatttgctacctcgagtcatattttcatttcttccaggaccttcgcgggtgcagatcgcctctatctgcacatttgggtatccataggtcgatgtccaattccagaacccctgtccttgcatttcctacccaacatcagctttgctgcccgaggcattgccccaatacaattctcgaacagatgttggtgcggcacccggcagatactagtgcttctcccttgatccatgaagatcgagactttcgatggaatgtttaccgtccgcattcatgtcatgcacccacagaggcgtctcacggcggctgccaacgagctttacacaccggtcttattcttaatcgatcgagatcttcaaatgtacacagtacggatagttcatgtgttacgcaattgggtttcttgaaatcgacaatgtgcaggcaacacaggcctcatctccatattttgtctccactaacgccactggcgtaaagtcctctagcgcggctctgaatccagttatactgccgttgcatacatccgggtgggctctgatcccctttgtcaggcacacttatcgatttgtccaacccgggaaaagtgcctctaaaaaaaaaaggaactataatatacctcccctttgctcgttggtgaattcatcgagaactctctcgatagatattttcttttcctcgctactcttctgaatcttattctcacttgttatattaggctgtggtactactacggtcttacttccttcatgcttcctgtccttcctcatccattggcggctggaccaggctatccattctcagcaagtctcggttcttgtgcaagctctatcaactctaaatttgatactcggtctctccataggttagcagaatcagcatcgcttctcgatttccgtgccaaaactctttggaatccgaaactcatactccgtagcagcaccatggctcagcaccctatgtatggaaacccagcaaccaccccgctggtctatcaacaaaggtattgtttggccgtcgttcattccattgcaaattcctcccaggctgtcatcgacaagaactgatttcgttccttttgctaagcggcgaaaggtcaccatctactccccacgggtatggctacagagacgaccgtcaagtgcctttcggtccaatggattctaaccgtcaggcccattaccatggaggcccagtccttccggatggccacaacctcatgatgagcccacctgcggcacgtttatcctaccccccagctggaccggtccacgtacaacccaggactcatgaatggagccacccaaaccagatgcctcgggaatccccgaggcgggaccttggaacaatgagcgccccggaaaccccggagtatatcatggaaagaaacagccagcggaccggcgagagatccagaggaagcccacactatcattcccagagacggacatccaaccgggatgaatttgatggcccgcatcagttcctggagccgccttctccacaggctgtcgcagcccaggataaagagctgccccagctccctactaacctcgatgccggcgagcaagacagcatcctccacaaggtcaacgaccgcctgtcccagtgtgcctatgacttcatcgcaaaataccagttccgtgttcccatcgagcaggacaagagacccgtcaaggtcccctcggaccgcgagtggaccgagtgggtatacctcttgaagcggctggctaccacacgccgcatccccgctcatctcttgtacaaccgccaaattaagcagctcatcactgtcctggagaactccctggagatgcgccatgctgccaagcaccagtctaggccagtcaaggacgaccgcaacgtgctgcagctcatttcggcggggactcaggtcgcgaaaatccttagggattctagcgccatgcagtatctcgatagtctttatgtggacaccgagaaattgatcctagaccgacgcggccgtcgtgtaagattcgcaaacacttgaatccactggaaaatggccgtttttaaaccctccgcttggattccactgttcactttttgttgtcttcccgtggaagcccattggattgtccttttcttttctctgctttccttttttccaagtccaatttcggaatactccactgtcaagttttgaacccccttggaggggaagtcttggtgatttcctatcaggacaaaaagagcccaagcagctacccagctcagacgaaggaaggattgaaactcaaccccttcaggctggaaaacgatcgaccagatcgccgcatgtcagaatgtttacatctgccccggaattatgtgacagccagtacaaatgagatcagtaatagggtggctttgtttgttttttcagtttggttcctactttcattccggcgtttgggttggttgtcttgatatgtttttatacttcatgcttcatgcttcatatgtttcccttatgccacacgactatgccgtacgactatgtcatgatttgggggtttttttgttgtacgcagtacgagattatgtttgtgatttacgttgtctacaatttgattcgcttgggtggtccagttctgtttttccctctgctaatattccatacgttccaggttttgggctgcattgttcctccacaagtatagtctcatggctctactgggctgtatgtactacagcttcacccaattgactcggacttttgaagaaagggccaaaaagaaaagacaaaaaatagtttccctgggaatcgaacccagaacctttccggaacacttgcgaatcgcatttgttaacggaaaatcataaccgctagaccaggaaactgctcggccacttgggccaattgatgaatggacaggccattattggcctcatgagtctacaactttgttcccaattatttaggtccggagtaacagaacgaacttgtttcgccaaccttccaacattcgaaagtgggcaatactcaatccacagcggcgagactctcaatggttcttaatacaacggagtattctgctctgcataggaaccatctagacccaatatgaatcgaggatacattttcacttatgaataccgtatgctgccgagcgcatattcgaagctcaaaactacagtaacctgaagcttaggagtatttaccaggtcttgaaactacagtctaccccttgtggcttagatatatgtggctgaacccgggtaaccctatgtcaatacctagtcggccattgcctatttaggtaacaaaaaaatgactacggagtatgccattcgctatattccgcgtatctatggcttatcaaggaatgtcagtcacagccatctttggctttatgaactagattgagtgatataatacaaattattcaacataaaataatcactcgccccttcgagctgttttgtgttgtcttattggcttattgcttcctaccgctcgcgggtacagtgattttctgcctggcaatattgatcaatagtattaagtcacccatggcggctgccgtacctaacttaacttgtagacaagccctgaaagttagaatgtcaaccttcccccatactcaacctctctactacagaccagatattactaggactacggccttttccaaaattttcaaataccactgcatacagatatcgaatgtaccatgttctacttatgaacacgctactaattaggctttgcgtcgtagtgtcgtgtaggtttcttgtggtgccatgagtatgattctaatataataaccttgctgatctttttttatcagaacggcattatgaattgtacaagtaattattatctagggatgacataatatagccacaggagccttggtagctgtatataaacaatatatgtcatgttacgttttccatggatgagaaatgagcttttgatgggacgtattaattgcaaataaatttgtgagatccagtatctaaattaaattcgtgtgtgaaagcgaccgttacggaccatgcctcactagttattgtcagtctgctgcacagagtcaggctcagcagggtagacttggtcaagaatgccacatgggcgcttgaggttctctagccaatgcccttgctgcttcgccagagcatctgccactgctaactcgtggtttgcgtgagcctgcctgttatactgtttagccctctcattcggggttacgtcactgacccagggccctaggtagttagctcccgatgccccatataggtaataaccttagaaaggaagttctgacaaatctcccccaacatcatcccgaggtccatcctgcctagaacttccactggacactttgcgtacccgttccttcttctattttgtctggtcgatcaactttcgcgtgttgcattttcaaaatggcctctcagccgggactcacgaatatggaagccacgatgggctctcgtaaacccacgtcgactcgccccaaactcgatgaaaccctacctacttctcattcccctcaacgcaccgacagcccatcaaccagacttgaaggcaccaaagtgtcgcctgtcaagcttctcactacctcccgagcaggcatgccattccataaaacagcgcccacccttcaatatacaaaccgtcgccgcgacgctgcttctgactcgagctctgactcggggcattttttcaagaccatcaccacacactcaacggttccgtcggagctctattcacgcgatcttgatcactcctactgcgttgatctcgacgacttttctgttccactagacgcgagagtcctcagtgctccatcgttccgacagcttcaagccgcactaagccaggtaagatcaactttccagccccaatcccccgtcgtcccagttcctatatctgcaagacaccggaaaaaaactattctccaaaattaaagaagacgaagagctctttcccggtatacgactgaaaatctcatatcttcgccacgaagtactgtttaaaataatacccggccatcagcacgattcaatcattggcggtttctctcaagccctattgatccagctattcataataggcctttcctatgacaatggggcgttcgtatcccgcccatcgccaagaacccaaggaatgtctgtggctaaggagcctgactggtggctctccccagccgatatctttgatgggtgggggggcgggattccctaccctagcccttgaagtcggcgtatcagaatcctactcccagctatgcaaggacgcccagtggtggtatagcaacttcactactactcgcaaacctacatggtgagtagacgtggaggtatggtccgaaggaccttccccaaatccgtataagacccggagtcacattaatacccctttccgaccaacgtagagagttacgtaccaagatgggcaaatccatggtacacctttggtgctcaacttcgaaagtatcttccgcagaccccgaaatcaacacgaaggggatattatcatcggcatgcagtccttagaagctatgtgccaacaagttctttcttaactatctatcccttgatagcgtggctgttgttgcttcctgtgtatggagcatcattcttctggttcgagagaaagaaaaatccaacctacctttaacgcctggcagctggccgaagcccttggcgcatcacgacgtttggcggaaagcatctgggtcggtgttgggcaagcggtgattaatggcggtgagctattatccaatgagagagttatgttccgatggcacatttagtcgccccgtactaggtgccgcagcaccggacaatagcaccaaaatcccccgagtgctgcagcacttgtcaaggcctactttgatttcgctattgctatttaggggagacctacggtatatataccaatttttgaaacattggccctatctttttcttttatttagcggcattataccctcgacatttgcattcatgtaacagttgcccgcaactcgacatggaagttttggcacatgggtcatgtttatcttttagattaattcattcatgtccaagtactgcattgttcaaagattataggacgccctggggcggccgacaatcttataactaactagatggccattccaaggtttaaggttcgatgctaatatagtacgagtaattaagaagaggatatatttgaagagtatgaggcatctattcatctatatatttaggacatgaatatcgacatgagattacattcgaagcaacaatcaccaggattgtttctttgccaaatcctgatttgacaacgaaaatgcatattagttcttcccctcggaatcgattaccactctctgagcctccagactactgttgtctgtttgttcctcttcctccgcctcgagctcgtcgacattccaattgccaaacaccgccataagcgtgaaggggactgtagcaccccatagtgcaaatcccagcgccatctggttgatgttggcccagtgggttgtgccgaccgcgtaggcaatcgtgctgccgatggactcccatgatctcaggatgccggttgttcgggcgatatcgccatctctctgcgctcccttgatctcggccatcaaccaataaatgtatgtctgcaacatctcatagaagaaccggaaaaagatatagacggtgaaggccgagttgaagaaggggccatcacccaagtcgaaggcagggggatcggtcatgcgggagagtttcgactcgacgatggcgttccatgtccaagacgctgtgacaaacacagcaacgaatatgtatacaacttgggatctggttcttcgtgacagaaactttgtatcgaggaataagcccgtcactatgttggcgctggcgccgaccacggctgtgaggaaagatgcaagggctctggagcggacggtgaagtaagctaggttttctgtcagcgatgccatttatcatcaagaaaggaggactggagatgtcatactcgtcaaatagtttccctggtaagttgcaccaaactgtccagcgaggaacaccgggatgagtagcagcatgtacttattcgaaagctgcttccagatagcgcgagcctcgatagacatgttcgttttcttcatgtatgggatcttggtgccattctttctgataacgtcttgtggctgagacaacagcaacgcaaatggagcgccgagagatgagatggcaacaaggcccaagtatgttgtgtaggtgaccttgccgacatgcgaagtcttgacattgagagcgagagaaatggcaccgccaacaagcggtcccatctggcggatagacatccagattgccacgtagctaacataaaaaggtcagtcggatacacaactgcatggtccgggagtctcgacttaccgtcctcttttctcctcctctggataaccgactgcaatggcagcctcactagcccatagaagagacgctccaattccacaaagagcggccgcgagcaagagaaaccactcattgccataacgattgttgcagtacagaccagccgcatagggtgtgtagaatgcggctccgatgaacaaggtccatttcgcagtgatcttgttgctgacaccgccagcaaggaaacagccaacggacatgagtccgtatgtcagggcattggcggcattgttcaggtaaggctgcacaatgatatgttagcggtagttgagcagattgtcaacactccgatgacttactttggcatttcctccagctccaagattattgagagcagtccagataccgggttcgcagaaggccactaatcccacgatgacaatctggaatagacatgaccggtaaaagcgggtcacacgttcgagaatcatgatggatgtgagaggtatgcaatccggaaatataccggagacagccactattagtactacatggcgatggggagccaagatcacagaattattttgaacgaaaagaaaacagcacgtcagaacccattataatcgcgatatcttggttttatctctcgccggtagagccccacagctactaggaggataactggtgctcagttgtatactggagacacttgaagaactctgaattagtgtcgaatcggtaatgggaaatacggagtcgtgggagataatcgtcgatatcccgaggttcggaatggtgcaaagtgagccattcgtctccaaaagcacgtaatattggggggcgtgtcgacagggccgggccacaacagacagacttacgagttattttctcttgttgtttgatatgtaccttgtttgaaatatgttgtagtatcttggcaggatgaggtattggaaactccgttataggactttataagagatgttataggctataaaatgtcttggccagtagatcttggggcccgccgacttctctcctatttccttcgaaggactccgtagtcgttaggaattccaaggttaaattagaagcctagaaaatcagacgtttgttttttttttatagttctgttgtagccaaattgccattgtactaacaaatctgcttcaaatcccaagtaccgctaaattacaataatgtacacctaggttaatctaggaatccgagataatcaaaagctagccatctcaatccaactggccacaaatgcgagtcggcgccctcgatcagcagccatacggcgcgagaactcttcaaagttaagtctcgcaccgtgaccacgttccttgttttcacgttccacctggtctaaatagacccaccgagctagggtccggggcgaaggtcggcgtggggcagtgtcacgaggcaggtcattgacccgatgaggaggtgggagtggttgcataggagaaggaggaagcttgggggctgtggcttcggcttctggggaggagcggggagaagatggggcgggaagagagatggtcccgggctggagtcggaaccgatcagggagatcagggtttgtgttcctaattggtgattcctccaagtcggagtctgattcagcaatcacttcctgggtcatcacgaatggctcgtcgggacgatgctgtgggagagttggatcgcagtggagtctttcctcttcaacaaccgggctggatggccccacaccagacgcagaggcagcgatatcatcgccataatcagacgaagtggcggacgttgtggcggattccacaaatggccgtgcttgcccaaatccagtatctcttccgggatcggcgagatgagttggtcgcacgtcgtcatcgtcttcatactcatcctcatcaccctcatctgaaacggtgggccccggcgacggagctagcactggtccggtattctcaggtaccaggactgggctccgaatctggtaaccagcgcgctgtaatagatcatcaagtggctgactgttgataatttcctcgagttcctcctccactgggggattctcagttgtggtgcgtttcgaggggtcctcttttgctgcgagttcaatctcgcgggcccacaacttgcgatcagctctcgtgcgatagacctccatcataaggtcctctttcggcttgaatagaatatctagaagctcgttgaatccctgttgcgtgacttgatataggatttctttcccaacgtccctttcgacctctgggatttcaaagccaccccatcgctcgccaacaggaatactccgggacgaggtggatgggttagatcgaatgtcgtactcatcgtcgttgagatcatcctggaatcgcaccttggacgaggaccgcgaacggaaagagggtgggcgcgataccgattcattaaggtcttcatcatcgctgaagtcatcaatggccggatccctttcataccctgcagggatagtggcgccatcttcttcgtctgtatagaaggcgcggcgcctccaacgttcgtcaattccacgctgacgagcgtcaaacacacgtctctgatcatcttcgcgcattctgtgataaacagcatccgcgacgcgagcccgatcaattggatccgtgatttcccgagcgggaatataactcccgagagcagaaataatatcttcttcgaggatgtgttcaactgggggccaggtgccactggccaccgacgagctagattggtctgatccactctcgctagcaccatcctcatcttcttcttcgtcgtcttcattttggtcactctctatggcatctggcgggcgaggagtagtctcggcgggtgctaagcgtagtgtagatgggaacaatggcctcattcgactgaattgtgctctgacagcagcatcacccacgaccaaatggcgatcaccagtatcatctccgtcctgtcgcaagattccttcgttgtcaatgatttccatgtccccctcggaattcatgctcttgccttctcctgtgcgagaacgttcacctgaagggatgctgccagggaatgcagagctgataggctggctaccaaggaccacatcacgggctccaccctctaggaagtcatcctccatgccagcaaccatgtcccttgtaagctctcggctcagcgcatagtatgccctgaaaacccgaaggaagtccttgcgttcgacaaagccatctccatcgatgtcgtagccgcggaacacccgtcgcagccgttcgtcgttgcttttgttgttgagactggccaagcccttcaggaattcctcaaacccgataagattgtcgccattggtgtcatagaatgcgaacattcggtcgtaaatgagactcgggggcggcggccggatagaagtattaggcacaaagcatcggtcgaatgttttgcgatcgatggccatatgcaacttgttcgggtcatttgcccactcataattggccaaacagcggaactgatcccagagtgcatcaagctccgtattttcgaaattgcagtctttcataagacgcttggcaagagggcgtggaagactgcgcgggagcattgaaggcttcccgggataccatacaggctgggattgacgagggtttcctaagaatggggctggaatccgcactttgtagaacaaatgtgttttgatatggacctgcattgcctcgcacgtctcacagagatcgtagtcgatgcaattggcacatcggtatctgataccctgaatcggcatggcaccacagctgttgcaagtaaccccacgatggatatagccgtccctccgcgcctgatcctcggcaatatgataaagcaggttaagcaggttttgaccttccctattagaaggatcgttgtttccatcacgccatgagaagacgctctggtcgtccaccaccgtctcaccgccgtcaatattctgtggaggggcagacacgtctggaaaagtggaggttgagagagtgacacgttcaccgttctgtcgtcgccgacgcagctcttcgccgtagttcgtatctccgttgaaccggaccagggccctttcaataccagctcgggagatacctcggcgttgaagttgttctgtcaggtatgttctttctgcggtatcctctgggagaatatgtgcagacgggaaatcgagtgcaaggaaggattcaagaaatgtatcctccatcatctcgcgcatgcgctctgcatgagcaggcgggacgcccacttcttccattagctggtcgcgtgttgcgaggagtgatggaagaagaccgctctccacgcgacgcccatcctccgtctcgatgcgaaatgtcccatatacaccattctgacgctctagctgttcaaggtgggtaatagctcgataagacggagtatcagcgatcccaggttcttcggcttcggttggtctcgtccggcgcacagcatttcgacgtcggagtgaacttgatgatggctgcgagatgacattgttgtgaacatagagaatcgcataggcagcagcgacaccagtgaagaggtagaggataggtcgatatcgtgctagtgagactggccctgggcgcgagtcggacatgacggaggtttggtggaatttgagctagcggaagctgcaaaaaaacatcaggaacacaaggtgtagcgcattctgatcacagctggataagcagatcaagtcagacccgcaaagtgtcaatcaagacactcaaattagaaaggatatgacagtcaatttggagatggcatttccaaggttgaaacgtcaactcgctggttgctgactggagcccggccgctctgattagtaagctatacttgagctccagggctgcccagcagagccctacaacatcatacctacgatgtacgagaagccaaattttttgaaaaaaatgggagatgatatattagctgctctatatattggaagcctatgctcttttcttgatagaattttgaaatagataccaaacttcttttatatctaatatgtcctcggtagcttctgtggtatatatatgcgataaacattgacaattttcaagccaatcccaattctagatagaccatgcactatagtaatttgcttgcaagttttttgcttttgaaagaacacaaatctaaaactttttgaagtatagcttcacctgtgaattagcggttgagtttgctttcacggatgaaacagctgcttaacaaagcgaagaacacgacaaaaaccaaaaaggcgaatcccttgttggtggaccagccatacgagtcccggacaattctggcagttgctgggtcgagcgttttgataaagtccagactttctcgcactccttcgacaatttgatcaatgttcttactgtcacgtagacctgattgcaatcgatttcgtaagacttgctgaacgacagttgatgataaagagagaccaatcacggatcccaatgagcggaatagatatgagcaagcagtgacgaccgcctgatcttcatatgtagcattcgatactggcggattggttagcatatattgaaggattgcagagcaagatcagataaaaactcactcaaaccgatcaaagttgtagtgacaccaatgccattgccgaatgccgaaatcaccatcccgcagatcatcgggactgtactagccaccacaccaccggagaacaggtatatacagaacacaccagttgtcagggaagcatacgcagcaattgtcagccagtaatacttgccagaccatttcatcaacaagcccgcaaacacggacccagtgacaccagctagaatgcttggcagtaagcgcagtcccgcagtcgtggcagagacatcatctactgcttggaagtataatggaatatagaacagggcggcaatccatcccccgaagctgaagaagttgcagctgtagcaagcaaagaatgttcggttgaagatgatgtgaccaggcgcaaagggttcggctgctaggtagatctcaactaagataaagaccacgaacaagacagcagagacagctagcgaggcaattgtcaggggtaatctccatgacacattactgccacgatcaagaccaactaggaaaccaagaacagcgccaacaaggactacggcgccaaggaagtcgatgcgacgcagcttggtcttccaatgggcgctatcgcgaggaggcagcttgagcaggaacgacacggcaatgaaagcaataatgcagagggggaattgcgctagaaacgccctaagtaaaaaaacgtcagatggcgcaaggaaatgtgggtctcgcatcattcataccagcgccagccaatgtagtcggagagaattccacccaagggtgcaccggtaccggcacctgtggcatagatgatattgataataccctgccataggcctcgatcgcgaagaggaacaatatcactcatcaaaatgcttacgacggtggtcataccaccaccaccaatgccttggaagacctgttcgaaatagtcagcattacatgattcagacctgagatcatatgtgaacatacacgagcagcgatcaactcattaatatcccgagctaaaccgcagcccaagcatccaaggccgaaaaccgcatatgcaaagaggaggcacggcttgcgaccaaatatgtcgcttagcttgccatatagaggttggaatgatgttaaagtgagaaagtaagaagtagcaatccaactggtcaggttgagagctttcaagtcgctaccaatctgaccataactggccatgataattgtctggtctgccgccgacaagaaaatctatatatcccgttagtcacaacttcgatttcagaaaacagaatcaataaacattggaagaatccatactccgagcgagatggcaggcacaatatatttgagctgcttctgtgcgtcattggacgactcttttcttcgctcctctgcttgaactgtatcccctgattccacatgatgatcgggaatcgtgccgttggacacagcgccgttaacagatacggatcccagcaacggggagttctcggtaggagatgtctctggagccattatcgagactgtctatcgtcagatcgctccagattgtccgaaagtcaaaatgacttgactgaacgtctacggagaaatcaacaaaagaggagagcgagggcatctaaaccccaaaaagcccccacgtgaagataagacgcccctcactccccgggaccgacttacccgtttcggccaatcaaatgtccatcattcctatgccgctagacctgcaggactttgatctgcgatgacatcgaagtgttgcctaggatatagccctatcttgtacgggctactcatttaatacattacctcacttatagaactatactgataggtcatcgaacggtcgtaaattcggctgttgaataggtatctgaactaaatatatgcaaaatttatttttagttaactcccaattccctaagttcatgctgtcgaaggcatgggaaccggcccaccaggtgagtcaggcagacgggcagtcagcacctcgacaccatcctcagttacgagaagggtatgctcgaactgggctgacagaagtccgtcttgggtggtgcttgtccagtcatccggccaagtgcggtcacggtaggtaccaaggttgatcatgggctcaattgtaaagcacataccgggcttggcagttccaacagccttgttcttggcgtaatggggaatgttgggcgcacagtggaacagctggttaataccgtggccgcagtagcttttgacgacactgcagttgcggctctttgcgtgcttctcgatgaggttgccaggttcgcggaacagcatgccaggtttgacgagctcaattgacttgttcgtacattcacgcgaggtttccaccactcggacggcgtcggggttcgcaagtgccttgtctccaacatagtaggtctcgttgatatcgccgtggaatcccttatgatacagagtaacatcgatgttgacaatgtctccatcctgcaagggccgttgatcgggaataccgtgacagatagtctcgttgactgaggtacacacggacttggggaagttcatatagttcagaggggaggggtaagactaaacttatgttagtgtggtattgcgcaccagagagcaacctctcgtacatcacgctcaatacaagccttgtggacaacctcgtcgaggtagtccgttgtgacaccaggcttcaattcacgagcagcagcatctaaaacctcacgagccaatcggcaaaccttacgcattccctcttgctcctccttgttcaggatggtgatgttatgtcggccgataagtttttgctcggagcgggggataccatcgcgggcatagtccgggtgcgggatcgtcttgggaaccgttcgtttgggtgacagaggatagacgggcctcaaagaaccggcgtaagggaaggacgggtacggattgaaggtaccggtggctggatctggttcagaaactaccttcggaggaaaaaagttggtgaggatgttactctttttgtggatgctcttatgttcgctctagagtatatgatcagcccttgacttcccacataccagggcgcatgtactacgcatcattcagtcccatcatagtcctacgtacccagcttcgtttgaaacagtcctgcgaacagaagaaactgtccgtgccgctcttcagacatgtcgggcattgtagggtgcctgcatcgttagggcagtccacaccccggcatttgcgagtcgcaacttcagccatgttagaatagcaggagtgaaaagaaaaaaaactggagggaatatgtagtgagtagattggacggcggccaaaacttcgagaaaatccccgcgggccggcgatacggagctaaactgcatttggactcctataaacggatgactaatgtcgatcatctcattttggaaggaagggggccgacctcgcagcacgtgatgatgacttattcttccgtttcaacgcgtacctgcctttgttttggacgaccagttaaacttacatgatggctattccaaggcagaaagtggttgttgtgggtgctggcccagtaggagccttggcagcactatatgctgcatcaagaggtgacgaggtggaagtatatgagctccgtggaggtatgtttcactgcctggtgtgacctttcttttcttttttcaccttttggtggccgccattggacacaacccgattgtcaaggaagaacgcatatgtctttggccggggatggctggctttttatccaaggcacaatgtctcgcaaggtccctgtgtcaactctgctattaggagaaacttactccgattaatccatatcaccatatcttccatgccccttgcacttgtcctggctcagttgtgattcattgcgaattcttccgaactgacgccaataatccctgcgcatccgtagatctccgagaccctacgactgtgccattgaactttaccaagtctatcaacttggcgctctccgaacgtggaattacgtccatgagaaactcaggtcgggatgatttgatcgacaatgttctccgtggagcgatccctatgcacgggcggatgatccacgggcgagaccgaggaggtctgtgggaagctgcacaggcctatgatgttcacggccgggtatgcaccgatcacctgcttggcagttgctattgctatttacactgcagatcatagctaaccactactataaggctatcaatgccatcgaccgaggaactctcaacaatgccctccttgatgagttggagaaaacccccaatgtcaagctatttttcaaccacaagctcacgggtgctgactttcggaccaacaaagcctggtttgagcgcagaatccccggtgagacacccacggccgacgatgccggtgtagctggtcgagtaccagagatcgaggtgtccttcgactaccttgtcggtgccgatggagcacactccgccgcgcgcttccacctgatgaagttcgctcgtgtcgattatcagcaagagtacatcgacactctctggtgcgagttccggattccaccctcggaagatggagacttccgcatttcgccaaaccacctccatatctggcctgggcgcgagttcatgttcatagcgctaccttcagccgacaagtcattcacgtgcaccttattcgcaccattctcgaactacaacaaactcgagacctcgccacaggatctgcatgaattcttcaactcctatttccccggcgtatgcccagagctaatcgagcccgcggcgttgagtgagcagtttgcagcgaacccgcatctcccactgatcagcatcaaatgcaaacctcaccatttcaacgccagtgtcgtcattatcggcgacgcagcgcacgcagtcctacccttctacggacagggactgaatgccggtctcgaagatgtccgtgtcctcttcgaggaactggacaaacatggagtctatgaccccaactctagcgtctacacacgcggtctcaagcgccaggcagccttccaagcctacacagaccagcgctgtgctgatacgcatgcaatcaacgatctatcgaaggataactatctcgaaatgcgcgccggcgtcaaatcgccgctctacaagctgcgcaagaccatcgaagaaactatcgatcgccatttcccgttccttggctggaaaacgcagtatgcccgtgtcagcttcagtaaccagcgctactccgaggtagttgaagctgttcaaaaccagagccaagtgcttggtcttggtttgagcggggctttggttgccagtgttggagctgtgtccatcttgatgtggaagtaccctcagtatctctcaccggtgggattggttcggtgctcgcggcatctggcttgtgtcgggttgaggaccattcgaagatatcttcatatttaaagctttttttttcgattttgagtggatatgtaacaatgtgcagatacctgggggattcctaacgcgtttagtttgttacacgagaaagtaccttaacatggacagcagactatggtagagagcatgaagtgcacaaaagggaaaggttctaatatccaagtctgaatttttgatcaaactaatataaacacctgataaccatacaacgcttttaatcccaatacctgataacaccgtccaatccaccagtgacgaccttgctggactcatggggatgccagtccacacaagtaacagccccaccttcctttccaccagcctggatcttatgatacatcttgccggtcttccagtcccagaagcagacataaccaccgctgtcaccggaaacaaggaactgaccatcaggtgagatcttgaggtcgatagcgtacccggaagtattatgcccaacgaagcgcttctttcggttctggcggaacttgtccgtcgcgctgtagacgacaatctggttgtcgcctgactggaaggcgacatacttgccattcggatggggcgccgcacgcgtgagcgcgaacatgtagggctctgcgatgaacttaatcgggacaggaatgccgtattcccaagcgcgcagcgacttgtcatctgaggtggagatgaagcggcggttgtcatcaacgaaagtaagagtgttgacggcagccagatggtggtcatactcttggaccaactcgccggaccgggtgtcgaattgcacaatcttcttgtcagacataccggccaggaactcgtgtgagtgttctgggctagggttgaagcggacaacgtgcggtgtcttgcctgtggaaaaccggccaagacatttaccgtattcggtatcccagagcttgatctgtcggtcgtatgacccggtaaggaaggtcgtccccgatggatggaaatctgtgtctgagattgctttggtgtggccggagaaagtccgcaagagttcccgagagtgatacacatcccagagcttggctttcccatcggctgctgatgaaagcagcaagtggccagatttggggatgaatcgaagagaggtgatcggcttggtgtgcgatttccaagtttgcacgagttttttgggtacgtagttcttggtggtgccgggctctttgcgcaaatcgatatccaagtcctgaggcacgtgcatgtacgtccggccctggtagtcgtactgctctgatccgtgaaactcggtggtttcttgcgtggcaagatcaccttcgtaagcggtggcatccttactcatggccggcataggcgccgtggtagtcagagtctcgtcttcctcttcgatatattcctcgtcactaccaagcgcgcgctcttctccttcagcaacctccacgtagtcatattgctggtcattttggtatttcgcccagggtcccagatatgcgccctctccctccacaacactggagtcgcccttcttttgccgctttgtccgccagtttgcggacgcgctcttagtcggcttaatttgtacaatatcccggcctccatattgtgccgcattttcgaggtttccgataaattggtccggtaatgtcggattgcgagtgtatcccagactttggaacgtgcgatgttgcgcagaaaatgtggactcgctgatggctgcttcttcagcaaatccagtcggaacattctttcttttgataccgtttcccggacctgctggcttgaacgggttcacagggccctgggaaggctttgtaagatcatcgtatgtggcattgtaggtgagggcttgggatgaggcgttggcgagggccatctgcatatgcgcttggtcctgtaggatcgttagtcttatctgttcgtcatagctcaagtgtaaggcacaaagagattcgggaaggaggatgattatggggggaccaaacctctgtattgacctctggtgcagcaacgaccttggtcgcggtcgtcaccgacgagggcatagctgtggcgtcatcatcatcgctggagtcataaccaagacctagtaaggcggacatgactaatatgttaaagagggtgtgaatgcgcagatctcaatgcccctttgcaacaacgtcggggttgaatgtggttgttaaatggtacggagtaggtggtggatgggaattttacgggcgtcgggagacccccgatacgaaggccggggaacagccaccgcagccaagctctttatcagccccaatgcagcttcgacgatagttaagtacgtcaattatgtctacctgttactcttcttacgcatatttgatggcgatggtatttctcaacaataaatcagttaaatgttagaacttgggtatcgtacgctcttcattgccaaccgcatgggaggtatatacaacttcaacaggccgaaagatacaacaagattaacacagaagaagaattaaaaacaaagcaaaagttagcaagagatgcaccaccgcgagtcaatcatacagtatctcgaataatccagctcacatcctcagctcgagacaccccaaagaaaatatctattacctctcatcgctgtagtcctcagatatctcaagactgaaagaattcgttgctcatccgtagtcatggccacccatacgataaggaatcatatcgacataccgagttatatgatatgacggccgtcttggggctgcactcaggttccagggtcgtgcgataggctgagaagaatgtccagaggacatcgacctaagaattttgtgacaacagctcatcggcagacggttccttgatctagccgggagaaccatgatgcatcgcatattcggtcttttcacgcagtcaattaccctcatcacggatcagggcaacaatcatgctgtaaagatagaagaagaacataagaaggtggaagccaagcttgatgaaggattcctaaacacgatttcgagtcagtcactgtgcggtaaattgggaggtagaaaccaaacataccttcttgtgcacgttcaacttgcggaaaatctcggtcgcatccaaaaggtgctggttctcgtagatcctgtattttcaaaaacgacacggttagcctaccgctgaagagggcttgcgactactcggggagcttccaacgtacttcttggcgttgaacaacacgaggggtaggttcagcacgatggcgagccagtatccgttgatcacgaagaggaaggtcaggaacgcgtggacagcggcttcggggatgatgtaggcgttgaggcggttgcaaaggtcgatagggttgatgtaatcgctgggaaaaaaaggtgaagtgtcagcttgtattcggcagtatgtgtggatcaaaaactgttgcttgggacgactgcgaagactcaccattcaagatcactgtacatgatcgtgaagaacacctggaggaagaggttgacggcgttgatcaacaccgacaacaggtaaagccatgcttcgccagacatcattgcgattttgacgttgcgtcaagtataattgacagaatttgaatggctaaacagaggatatgagtaaactgtcggcgacaaaagtgggtgaggttgaggtggattgaagaggccggaattggagatgtttgtggggttcttccgcccaaggaagacagacgaatcgcacagagtcctctccaaagagggatcaaagctcactcacaaaaacaaagctaaatgcactcaagctgatggagatgaaaaacaacgtactgagcagagatgaggtgggatcgaaagaaagagtttcgattagcgaactgcggtcggcggtgtcgggagggctggtcatcattagcgcaacccgcaaacggggctggtaacgtacatgctgtagtccagagtactcgataagaaatagattcaaggtgttgtagtcgaagtaaatattgctgattattgtaactgagttcttttgtccaggtggcaaccttggaaggttggtaggaggatgacgtggaccgtccctcgtggaagtacatgggaaatacggagtagatgtacccaacttcaacgttgtttatttggaggcatgaagggatcattaggcatgtctattttgtctatatacatagtgacaaactatagaccgcagcatacgggcttccatgcatctttaaagagccgatcttcaatccccttcgcaatgaccgcaaaacacgaaacgacgtcggacatggacaaggaccaagtccaacccaagacaaaacacaggatcattgaaaacaccctcgatggtatcataccagtgtatagcaacacgtaaggaccagctcatcgtttctcgacaagtaggaaatgcattgcactgtatgcaatgatgatgaaggccccagaaatgacagccagcccgataacatcgctccagtaggcctgggtgtcaaagccgaatgcgcttaagatagaggcaccgggaacttcaatatccaagccgtacttgtgatcaatcaaagtgaggtaagtcacttcattgacgatcaaggcctcgaagccatagtggaagatggacagctggtaatatggttagtagggaaagcatcactcaggttagagggaaactcacagtctgcaaccacaatgctgacttaggaatcgcatcgtgattcagcaggagaccggcgaagagcaaactgaaaagcatcaccaaactgccgataagattggcgactccgccatcccggaaaataatgccaatgaagaggcaaatgttggctgccgcgagattgaaaaggaccagaaccagcaaaaagcggaaaaattcaggccacgccggaatcagacccgtcatggggtatacaatcatacccatgatgatgggaggaatcagcctcagaggaacgatatcaaacacgactttggacgcaaagtatgtgaccggatggtaataaccattggcacgctcacgtacaaacaaaagccgctccgtggagaacacgttgagactagtcaaagtactgaaaccaaacagagccaagatgaagaagaaaagaccaagacgattctggaagcctttgatatcgtcagtgaggccatagaagaggtatccagataaaactgcgagaagaatagcaattgcgtaatgtgtgagcatcaacatcgggttgcgataaaggttgcgccatgtccgctgagaaaggatcatgaactgccgcaccagaccaactcgggcatagcccttagactgtatcacagtatccgacaatatgggcgaatttggtgaaccgttcgcagcctgggcattctgaacggcggttagaatctcatcatgaacaaaatggcaaacgtcagaatccgcatagctagccaccaaaatgtcgagatcactttgtccagatgccggaggagggagctgatcgggatcatcgaggatttgcggaggaacattgctttgttgacgagaaagacgcagccattgttgatgattatcggctacatccaatgtagcactctcgtcatctgtctttggcgtgactgggcgctcattatgttgctttcgggagtaaagttggcgatcctgctgctgttttagagacacctggcgtttgcttttgggtctccgagtcgcctctgcgccgcttgagttgtcttcaatactccggatcgacgcgctggtgacagacttgacggctctgagactgcttgatgcggtcttagatggaccagtgcgcccatccacagacaacgccacttcgtctgtatatgatgaatgtgcgcctccggcgtgcattgtaagatcaacaaggtaatctgcaatattgaatcccggtggacaggaatagcccacacggtcgaaatactgctggcatgatgagaaaggaccagaatagacagtgcgtccatcagcaagaaggatgagtcggtcaaagagagcaacaatgttcgagcgaggttggtggatggtgaagataacagtgcggttgtatgtcttggcaagcgtcaccagacactcaaccacattgaatgcattgtaggcatccaatccactagtgggttcgtccaggaaaaggatactagggctggtaaccagctcacaagcaattccgactcggcgcttctctccaccggaaatgccacgaccattgccttcttccgagccaatcaattgatctttgatgtgatagatcccaagttgcttttcgacctccaggactctctgctctttagctgcccggctcatatcccggggaagtctgagtagggcgcttgtcaagatggtctcatggactgtcaaggtagcaagcatcgtgtcttcctggtcgacaaagccaaccatggttctgaagtcattatcatcaatcttttcaccgttgacataaaagtttcccttcactgagccacgtttgttctttcgcgctaggatatcgaggaatgaagttttcccagcaccagatgctcccataatggctgtaatttggcctggtatggacgcaccttgaatgccagagagaatctcttttccgtttagtgtataagaaacggtatcccagtacaaagccgcggggtgatagtctgccaggagtttggcagattcgtcgtccgaatcatccgaaagagacaggcgaatataaccgcggcgcgcagcacgacgggacatataccagatgattagaatgaccgcaaccacaaagagtgaagttcccgcgatcacgccggcgatgagtggagtgttgattttcttcacggggcgctcgtatccaggttcatcagtcttgtacatgcactctcctgaatcgcatgacaagaagatacttggatcaccgaagacgcccgcaattaatccgttcatctgaggctccgagaaaacgctcttggtaccctccagggtcgatttagtatcgaaagtagccgggcccttgatcagttgatcaaggaaatcgctcaggtcaatcgatccattctcgccacagaggaaacggcccggaatacattcgcactgaaggtgctcgcacttgtagtgagttgtattggagttgtagtctgtttccgtgttccactcgcaagtgtctaggccgcaatagaatgactctttctggtcaacccaaaattggaagctacatgtgtcatcctcagctttgcaggaaaaagtcacttgaggtttgcggccgtcgagctgtttcaagatcgcacggttggtcacatcacacatttgaaagttctccttgaccgtggcaccttgcttataacaaacgcccccctgaccttcgggcatcatcgcgttgcaggcatcatctgagttgcagacattgcagttgatgccttcccagccatccttgcattgacaggtgttggaatcgcgctgcggtcggttcaagtcgtcagccaacgaaccgcataggggaattgaacagtcgtcgcctccaaatccgggcgggcatgagcatttgccgttgaagttattgcaatccgcaaaatgagtgcagttatagttgtcgagctggcagttgaagcaagctggacactcgggacatccgggtggccgatcatcgaagagggagtaggattgcgtagcgaggtttgcatcggtaaattcgctccatgctgcagcagaccccagtaaaggagttaatgtgagaagcgaaagggatattgcgccagtcaagcgcatcttgtggaaaggatgacagcagcgtgtcctagtacgcagcgataccaacaaccgaggaaggagtgcggggcggaccgccgaattgatcaaattagagaataaagctggagcatatagctgaagtaaaagatagagacaagttcgaaggttgagaagcagaaagcggagagattcagagggtaagattagccccaggcgatgacgcgggcggagaagcgagaggaggctgggcgtcaggaaccaacagtcttatgctatgcaagaccgaccccgatggtttttcattctacatcaagatactagataattacagcaacatgctagataattcgtaaattccaagctttcccaccacagcattttttccttcccatttctgtatacaacataagtggttctacctcaatgcggggaaacacgtgatgccgggggatatataccatgtcgaccagtttagaggacaaaaagcaaaaaaaaagaagagaagagaagtctatagaaagtagctattctttgctacaactgattcgtagtcttttatccacgagcgccgaggcctgggacgtatgcctcaagcttgggcaatcctcccaagaactgcaaagtgtgttgttagtagatttgtatgtcgaattcgttgaatgcaatttctgatagagttaattcccttggttgaacggattaaccgcaacaaggatatggagcaaaatggaatctcctttattgcacaagatcattgaaagaccaccatcggaacgtaggcacctatgggcacctatggagtattgccctaatagatcagctatgtgccgggaacctccgtgaacaaagaaatagggcggggatctgttcctcgatacttgctcggtagcaagtcctggacgagtacatatattacgaaagttatggcccgcagtatgcaaacttccagttcaaaggaatcacattcattttgctacccctgctagggctacaaatgccacgtcactagcagagactttcaagctcgcccgctttttagctctattttgaatgcctcgactaggtactcgaatttaccgccagataactggaataccgtcctgaatctttagctacagtaaaacaacaaacagacagtgttgaaactttccttgaccctcaacatgtcgcccctagacaaacgcagaaacagtgaagtcatacacaagctggaggctcgcatagtcttccacagcctcaccgatgatacccatgatgagacactgctcaaaccctacactcaccacttagcacgggcatgctggaacggtagtcggatcgttctccgtcagacttcacaggaagcggagggaatatcgaccttattatggagctacatagtgcatgcaacgggcgatgggacgatttttgggatcgcggcatagagcaggatgatctcgatacatggcttgggtttactggcacgtttctgtccaatcttggtaaattttgttggtctccaccgtggcttgcaagctttccatccatgacctgaattgctgatgtcgcagtaaaaggatgacggagatcgtaaggctacccctggtgtttccaaagataccctgcgcaagatagcgagcatatcacctgaggcaagcgcaaagcttgaggaagtccttgatccgatgatgacagcccagccggctcaacttagtatcgtcatcaaaccaaccagtcgagttactaccctggaaaagagtggattacaaaggaagagatcgagactgccaccaagataatggaaaccaaggggctctaaccatcagactcccaccgctgtcatatataatcgcccgttgcgatttaagcaatagcggtgtgcagcgctgtctggtagatctactatcccaccctcagctcaagcccaatctgcgcacacctattttcaacgtgcatgtcctccactttgcaaccgcacatcatgatccagaccttctttcatggttggcagcttccatccccggtggacttagtagtgcggggacaacggccctaggacatacgctactccacattgcttcgttacctttcacttccaatcagactgcactttataatccagatgtcgcggacagtatacattgtgcccgcacccttgactctaggtggtttccttatagaatgccaagccctctgcatatccagttcccaaagccacaggaaggctcccgaaaaccacagccactgacggattcccagcaacaggcacaaaatgcaagtattcggcttttattggaatggggagggattgatgtcagggcaaaggatatcgacggcaataccgctttacattacttagtgaggatattgttgaaatggttcgacaggcggatggaggggaagaaacgtgggagaacgcgacaaaccgccatggcattactccacgagagatgtggtgtaagtgagatgtaaggcaaagatgacaagggaaggaatattagtttcagccttcaatttcatgccttgtcgtcatcgtagaggatgtcctagtacctcttcttttcggcatactggcttaattgcttgggtgagtatgaatgtatggataggctcgaattttattaagcattttatattttgcttgcctaaatagaaagtatgttattccctgcatgtgctggatctcattttaaatatattgatccaggtatacaattctagaacctagtttactggggaaatttccacaacttttgtttgtgctaagtcgaggccgggatagcaatgtaaattcttcccggcaggtgtgaagcagcgacttcgcgcaccacgtggaccaggcttgtacgggaaaatatccaagctcttggaaatcctagtcatgaaattcagttgaggtcattttctaatacttgaactatcgatgacattctgatatagcataatgtagggcgtgtgagaacaacctgaaaattaatttagacctagaacaaattccaagcacgaacaagctaacgcccgatgaacgacctcgacatatcaatcaatctacgctaaggtgaggctggatcgggaacacgatccatcacgtgataacacggacagctcataggtagagcggcggtagcataagggaacaagttatcacccattcagccgaacattggaacgtccctaggcaaagagagttgattatagctacttcgctcggtaattcccactattataaaccatggtgaagattgaggccttcgcggttgaacaggtacctccccgcattaccccatggctgggtggtacttgtctgctccctctgtcgttacagatgtgttttgttaaccgtcctgcagtggatggacaagtatgagaccactgcgaaatataataccgccgagacctgctgtgcatccatctccgtcgacgatctccgcgcgctctccgatgacaaggagtccaaccctttagcccagcttcaatccaccaaactcacatatggggcgatccgtggctctgataaactacgaaatacactggcgaatctgtactcggtaagggcaccgacgcagttgccgaaggaaaatatcttgatcaccgctggcgcaatccaagcgaacttcttgctgttgtatacgttggtcggcccaggagaccatgtaatttgccactatccaacatatcaacaactgttctccgtccctgcatcagtgggggccgaagtcagcctgtggaagtccaaagaggccgatggatggcagctggacattgaagagctgaaaggccttatccgacccaacacgaagttaatcatcataaagtatggatttcctgactcttattacaatcatgcaaggcgtgcttttttttcctgaccatcattctcatagcaacccgcaaaacccaactggagccatcatcccgcgccagactctccaacaattggtcgatattgcccgcgagaaatccatcatcatccactccgatgaggtctatcgcccacttttccacaacatcagtcccgcggatccgaggttcccacccacacttctttctatgggatacgaacgcacagtggtgacaggatccgtttccaaagcctatagcctggcgggtttgcgggtaggctgggttgcgtcgcgggatagttcgatcattgaatctgttgctaacacgcgcgattatacaaccatctcggttgggcaaattgacgaggcaattgccggttttgcattagcaccggattgcattcacaatcttttgaaacgaaatatcgatctagcccggactaatctctctattctagagaagttcatcgatgctcatcgctgggcatgtgagtggattaagccgcaagccggcaccactgcatttgtgcgctttaacaagatgggaaaacccgtagacgatgtcgctttctgtgagatgcttcaggaacggaccggtgtgatgcttgtgccgggaagcctttgctttggagtcggagaagacttcaagggttatgttcgcattgggtacgtcaatgaaaccgaggtcctggagcggggcttggatgccttgggtaagttcatggaagacggatatgaggatgtaccagtgaagaagcccttgcaaaagtaaaaatagccatcccgatgccactggtcaactggacatgcaaactagccttttgtactctccggcaactactagccgagcccgtttgtataaagaagaatcataacaatgtcagaacgatctacagaatgaaaaattaaatcattattgaaagaaacaactgccgtacaacgtgtatgtggcgaatacgttgcacaatgttgcatgtcgtcaggggatcggcacatcccgaggtccgtgccgaggcccgtttcgatctctcctactccggacatatctcaaccttaccggatccattagatgaagtcaaccaatattgcttttgatctgtgatccaataaaaggcagcgaagccgaggtatcagtcaaagagtccctataacacctcatctgctcttccttccagagctacattcaaagccgtgatacctaaatatcatatccctcgagtacattacttgagcatactatcgatctcactcctagatcatatccacttgagcttgatccttgaatatcttggtcataatgccgctgccatctttgtccggtaggtcataccccatggcgggactgaatgcatggctaacaagcggactctttgtgcagatattcccttgagtcttgcactccctgccgcagcaacgacactcgcatatctcaacgcaagatggtcggtttcttacgatttgaacctcctcagggggttgctgaagatgtccgcaaagtcccgcattgccgaacgtggcgaccgcttgaacctcttctacacacttgaagcctacgcactcgatcctaaaactgcaggaaacgatttcattgtgtacaatggacgaacaacgacgttccacgaaggctatatcatggttcttcgctacggggcatggttcaagaaagtccacggcattaagcgcaaggagattgttgcaatcgacttcatgaactcttccaccttcatatttatgctgttgggactttggagtattggagcagtcccggcatttatcaactataacttgtctggcaagccgctcacccactccattcgaacgtccaccgcaaggcttttggtggttgacgaagaagttcgtcactgcttcccggcggagcaggagcagatattgacatccccgaccttccgtgatggcaagggaccggttgagatcgtgtttcataccccggaggtggaagcgcagattttggggatggagcctacgcgagaggatgacaaggcccgtagtggcttgattcctcgcgatatggccatcttgatttacacaagtggcaccaccgggcttccgaagcccgctattgtcagttggaaaaagtgctggtctggtagtttgtttgtcaaagattggttgagcattacttcctctgacagattcttcacggtaaggtccaaacttataaatgttactgcccaagctaacctcctgtagtgcatgcctctttaccatagttccgcttcgatacttgggttcataacctgcttgatgagcggatccgccatgatcgttggccggaggttctctgcgcgcaacttcatcaaggaggctcgcgagaacgatgcgacaattatccagtatgtgggcgaaacactccgttatctactaggagtggcacctgcaattgacccggtcaccggcgaagaccttgacaagaagcacaatatccgcttggcatttggaaatggactgcgtcccgatatctggaaccgcttcaaagagcgttttaacatccccacaatcgccgagttctacgccgctaccgaaggcactacgggctcatggaacctttcgacgaacgacttctccgcgggtgccatcggccgaaacggtgctttgggagatattgtccttggtcgtggctctgccatagtggaagttgaccacgaaaccgaggaaccgtggcgtgaccccaagactggtctctgcaagaatgtcccccggggtgatcccggtgagttgttgttcatcctcaatgcagcggatcccactgccaatttccagggctacttcggaaacaagaaggcgacagaaggcaagattatccgcgatgtacttaagaagggtgatgcctatttccggaccggcgacatggttcgatgggacaaagagggtcgctggttcttctcagatcgactgggtgatacgttccggtggaagagcgagaatgtatccaccagcgaggtttccgaggttctgggcgcgcatcctgatgtacacgaagccaacgtttacggcgtgactcttcccaatcatgatggccgtgccggatgtgcagccatcctgttcaaccagcaggtagcaagcggtaacctctctgataccgccctggaaccctcgcgtgaggtgcttgatactctagctgcgcacattctcaagaacctgccccggtttgcggctccgctgttcttgcgggtcacgcccctgacgcagtcaaccggtaataacaagcaacagaagcatgttctccgtaccgaaggcgtggatccagctcttgtatcgaagaaggaccgactgtactggctccagggtgatacatatgtccccttcggacagagggattgggaacggttgactggtggtcaggttcgcctttgatccgtctagttttcttggacttgtctcgtcttgtgtgtcacctttgccttgtcccgttatatctctaagatttttcggtcctatggcctgattcgtagcctcattcaccttaagataccctcgacagccttcaattcaacaatctatatacgcccattggggctgacctggtatcactgggctgagtttacacgtaggacatacaagaatagtcagtgttctctgcccttgacgatgtaagactaagataatctgatctatttagcccaagatgacctcggaggcgttacatgtgtttctatatgtctttttcgatgtatacgaaggcggcaaaacgatatgtatgactgttggaatcatggacaattatcttgcctgatattcttttcctggcctcgggtcagcttagtaggctatgcatgacgtggaactcggtaggaaatcccgagtcttagaaggcacggcaactatcggaaggtaccattagaaactgacaggaagggactgccctcaggcaagagcgttgggtttatgcctaaggaaggaacgataaaaaagtgagtataaagggaaaggtcaacccagacattatagcccccaactcccatggctcagatgggatgcgccctgttcctcgagcaggctagctgctgctgaagaacctttgggcccatcttttttttttatcccgttccggatcatttgaagctattcacacttctggcccaccataaccccaccctcgcaataactctttcagcgtcttttcttaatgttttcacaacaattatagtagaccgcttacggggccttatcatgctactttgggggtcttcgtagatatatattttaagaagctgtatagccttggacatgctctgatattgctatgaaagattctggatatattcttctttcaagggaactaccccgcagttctcttaacgttcgacttgtcaaactagttgaaattgtccaaaggcgaatcagcctcgacaatcttccacacctgctcaatctgtgctactatttccgcatcgagcggacccttgctacttgcagcaagtgtctgattgagctgctcgacattacgtgacccaacaaccacagcatctccaagttctgctttgaggtcggagttatgcaccacccaccgatatgccaattcggccttggagataccaaattccttggatatcttctcccacttttccaagccctccagcatgctcggcttgttgaaaagcgcattgtagatcccaccaatctgtgtctttggatcccaccgaccctgcccaccggagaccaacgtcgcgacatccttagtcaggaatcctcctgcgatgggcgaataagcatagaatgagatgttgtgtttccgcagtgtgggaaagatctctttctctgctcgtcgtgcaacagcggaatagctgccttggtagacacttggcacgacataattcttttcacagcagatgcggaccacctcttcaacctcctcagccagatagttggacagcccaaagcgcttgaactttccagccttgtgcgcagagtcgatactggccagcaggtcttccaatgagcttctgcgttcgggagcatgcatgtagtagatgtcgagctagaaataggattagggattgggtctttgcagcctcagattacgaaagaagctcacctgattagtttggagaagggccaaactctcgttcaagcttgtaacaagagactctggggtggagggctcaggtctaaacccgccagggaatttcgaatcaatggcaaagcgggaatcggcgtgaagtttgcccaatagctcctcggagttactgtagatcttggcagtatcgatgcttttgatgcctttgtcatgcagaatatcgaggacctcgctgatggactcaagagttggataggcggcttgatccatgattgaggctccgccccagacaatcttgatgctagccatgatagatggttattgaaggatgaaggaaatatgaatgtctaaaatcagccctgacaattgggttatttatattccatttcaagcttacaatgctatagaagatttataatcaaagcttcaaaatcaaaaacctcatacaagtacaacgcacgaattcatccgtccgtgggcgtctcgtctcccccggggccgccggggtggattattcatcgtaatagtgcctctcacggtacaatagatagtcttatacaagcttaagatagtatatgagagctatataggttatttgacttcaattaaatctcactaggatgggggaatccagtaatccatctgtttggcgtggtgagaattataaagtcctagcaatccaagtttatacataggaaagccgtttattaaattgcgccctttgcacctttttccgtgtacctaagaaggaggagatagtcacagaaaatatactaatgaaaactactgaaaatactaccaaaatgtcatgcaaaggccttgtccaataccattctacggggtcaagtatagagccgactcgggagcaaatcggcttccccgcatgcatttggagatccccgctgtttatttccttctctgcttttgtttttatctctctcctcaacccatcatgtcttcaaatttgtccttactcacacaccttcgcccccgcgtactggcgcgaacccgaccgggcgcaattcgcagtttcaccatctctcagcgtctccgctcagatgcttcctcggtagcctcggccttcttgtcgcgcttccaatctctagggccacaaacccgcacgcaaacgatagatgcaaaccagctccagcttctcaccctcaccctcaatcgcccgactctcttccccggtgccccctccctatcgaatagcgctcccgctccgcaatctgcagtacccgtgccgccgggctatcacctcgcgtatttcacacccgcgttcctggaaagtgaacttggggcggatggaaccgatgtgtcgtataatcccgacgtgcctttcacgcggcgcatgtgggccggcggcgaggtgctgtggccccgtgtggatgggaaacccaatctgttacgggtaggacagcaggtgcaggagacaacacgggtacttagtgcggaggccaaggttgtgaaaaagaccggcgaggacatgattgttgttggagtcgagaaagaattcgccaacgagcacggcgtgtcaattattgaccgacggtccggcttcccttttcaagaatcccgctgttcaaagtactgacaatatcattcacatagcaattgggtgttccgcaaagctctacctgttccatctgcgtcaacgtcatccagcgctcttccgtccccaacgtcccatattgcgaccccaaatcctacctcgttcgccatttccaccgagggcaacgcccatacgcgaacactggtgcaaacgccggtgtcccttttccgcttctctgctctgactttcaaccctcataagatccactactcactgccctgggcgcgggatgtagaaggacacaaggatattgtagtacatggtccattgaatctgatctgcattcttgatctctggcgtgacacgcgccagaatgtcaccgattctaccttggttgttcctgagcgcatctcttaccgggcaacgagtccattatatgccggggatgagtatcggattgtgcttgaggacggcgagggaacagaggtgcagattattgggcccgggggagtagtggccatgaaggctgagatccactaaatatgaactgcacaaataaaccaggtgtagaactgtggtggttacagtttgggctattcctgataaaatcgaaggacaaaaagctttggggcgtgtagatccccctcacgggctagcgaatccacttcttttccctttttttacctgcgatattcgtatttcctcatttgctgatcgcaataaccacaaacaataatgaacgaaccttcggaccctgatgcagagatatccgcccccaaaaagagaacacgggtgcaattttcgtgcacggcgtgcaggtatcgaaagtaagctcaagttcaacgcatgacgtgcatacatcatacctagcatatcagatattgatccactacagattgaaatgctgccgcaaccacccttgtaataattgcaagaagcgaggcgaggccacatcatgcacctatgtcgggcgcggaccacgagccaaagcccagcatgggcgctcgagcccgactctggtccaggaccgcctgcaccatctcgagaatctagtgatgtctctagcacagaagcagaggtctgatctcaatgttgatttcaattcagtgcaatcgggggatcgggatgctggcgcgatgcgctcacttgacgctgcgttgactccggttgacacgggcacgctggtcgtcaaaaatgagggaactagttatattgacagtgcaaattggcgcgctatcctggaagaggtccgtattgatctaattattgctgttctctgaaatggttgtgttgacgggttcttcaaatttgaagattaatgacgtgaaagaatgcatcggagaaaattccaacgatgaaggcgtcgatattgacccgtacgatgcctcgtcaccagttctactgcttggtaatagtcgtccggtgagcaaagaggagatgcttatggacatccctccacggtcaatagccgatcgcctggtctctcgattcctcaagacatctgaaccggcacgaggtatgagattctcaaggaaaacaacaagtaccgagtactgataagccagcagtggtaatccacgttcccacgtaccaaaaagagtacgaggagttctggctacacccagcagataaatcatttacttggatttccctcttatactcgatcatggctttgtccgtctctctacatcatcgaggctcagagcagtcgccttctaccatggaagactctatcaattcatgggccatattccggaaaaggtcatcgcagtgtcttatccaagcaaactacatcaccccagggcgatacaaaggagaagcactattactctactcactcaccgagttctaccgtacccaggatgcgcagattggaatgtcctatttgcttgggattactattcgcctggctatgcgcatgggctatcatcgtgatccacgtcattacccaatgttatctgccatggatggggaaatgcgccggcgtctctgggccctgctcgttcagcttgacaccatagtctcattccaagtcggtgtccctcgaacaatccagccttggcaatacgacacagagttaccttctaacttgtgggacacggacttcgatgagagttccgttcaattgccacccgggaggccggataatgaaggaacagattgctcgtacatgagggccaagtctcacgttatgagtgtctttggtcaaataacagacctggcattctcccaagagcgctcatcctacgatgagattttggaaattgaccgtcgtttggagactgcgcatgatatgataccctcgttcttgaaagttcgaccaatgacgcagtgtatcgcagacccagcagaattgaccacgcggcgcttcgccttggagctcttgtatcaaatagcacgtcttgtcctacatcgccgctacatcgccgagaccaataccaaatttgcttactcgcgatcagtctgcctggccgcagctcggcaagtgcttcaatacaacacagagatctggtccgagttcatgcccggcggtcagttgttcgcagcgcgatacttcctcaactccctccaaaattcctttatactctcggcaatgattctttgcctcgagatgtcccaggatgcagatcgtggtcatgcttcacgcctcgagcctcgagagcgagcagaattcttgcttcttctggaaagtacccatcgtatattcatggaaacccgtcaccggtctgtcgacacacagcgagcagtgaatgctttgactatcatgctcaaacgagtgaagaaaggtgactcccaatcttccagttcgactgctgggcaatcaatggcacctatggatagtaagtattacttttctcttctcgcaatatcatgctgattatattacccagattatatcttaacccaatccaccagtgcatcagtccttgatcaacaatactcaacgtacacatccaatattagcgaattgcagtctgcaatacccaaccccggccagacgtcatataactccctgggggtcattgaagacatgcttgatatacccgctcaactcgactgggtaagatcccagccatgcttaacacaactaggactaatcctttatttccagaacctgtacgacagtcacatatcagcagtcgaaatggccaccaataacgacatttggtactctggtggtccagcaattccgtatgatttcggcgcttatcctcctgggtcatcgtcgatagatcatgagagctatcaatgacaatgtgaactatacaagaccatatcatcaatacatatctcgtaaaaccaatatgtttctgattaaaagaaaggtctagaatacaaaatcgaaccaaatccagagagtatgtactgagtatgcatccaccgagagtatgcatccaccgatcttgccgaggcggctgcagatcccgctccgcggaaccggagcttttttcttgtctgccaggaacactacactccaagcaccaagccgtataaatcttcttatataacctcctaaatgcaacccatccgcacctcgcgacttctgagtcgcgcaactctaccctcccaacgccagaatgtgtgcgcagccccccaccaactcaaggcaagcacgaggacaataaacacaacacaacggccaagtctgcgccgacctctactccccagcaatggcaccaaaaccaccacacgagcatttggcctgcctgacctatcctccttcctccccaacagcaacaataacaaatccccacaccgcgtcctaaccgccacccgcaacctcccctacaacccaaccctgctatacaaagtgatctcctcggtcgaatcctacagccaattccttccgttcctcaccgcctcgaccgttacagcgcgagatcccgaaacggggtacccaacacaagcgttcctgaccgtcggctacggcccgctcagcgagacgttcacgtcgcgcgtgatctgcgacgtcgagaagctgactgtggaggctaagagcggggccaagtgcggtcaagagggacagggtgcccaggctagtaagagctcttcttcgtccgggctaagcgggttctttcccggtgcgaatgagggccttttcgagtacctgactacgaggtgggagctggtgccgatttcacctgctgggacgcagggtgggccgttgactaaggtcaatttggaggtgcggtttgagtttcgttcgcagatgcatgctactcttatgagtgctgttgaggggcagatggccggggttatgattgaggcttttgagaagcggatgcgggaggttgagggtaaagggcagtgaagtgtcaattgtagattggattgtacattagtggagttttcgtattcgggcataaatggcatcacactacatatgactacttgttagacttgcatctcttcgactcttgacagcggaagggaaatagagagcatcaccaatttgattctattggatggatcgctgtacatgctcaatcagaagcctgtgagaatgagcaatgagaccaaaaaaaaataaaacatgatagtatataatacagattatccgaacacagaaatgattttcaacttaaagcatgctcatactccgatgacggttgatagagttgcgtgagttcttcatcgagccgacagcattgtagttatcgaacaccacatcccagttaatccgatcccaccagcgctcgaggtactcatcctttccggcaataccgtagtccatcatccacgcgtgctcccatgtgttaacacagagaataggctgcacgtcgacggcaccgggagcgaggctcttctggttctgggcgtgagcgcccatcgaaccggcgaactggttgcccagctgtgtctccggggtgtgggtggccatgtcgacgggctgccgccgggagtgggcggccgggtagggcgagccggcgctataggtgcagaagatgtgcatcatgccttcgcgctcgaggttcttggcgagccacacgaatccggggccgaacattgagcttgctgtggccaggaaatccaacttcagggactcgacggaggagcaggtgtcgacgatgtccttggcgaacttttcggggacgctggtggctgtgggggactatattgggcaggctggtcaggattgaatatgtatataaagggatttatattgctactcaccaggcagttgaagaaaaagtggttgttgtgggccattgaggcatagttgaacaccgaggccatctccggacgcttggagtatttgaccagcaattctcctggtttggcatctgcgtcgacggtatctattgatttcggttgttagattggtatctccgtgtgcaatatcgctcaattatcggattggggccgaattagatcaatccatcgttccacagggtcggagtgtcgggctcaccttgtgtcaacaggttgagtttgttaacgagaagactctggtattgggtccatgagaagtcgaacgcctcaggcgaaaggaactccggaacaccattctccttatagtaggcgtcgtgctgcaattggggaatgcgatggatagcccgagtctggaagcgtgagaaggcggaggtaggtttctggataaaacgcggtcagtcaagacggattgagcggcggagaaagtaagtctcactggagagaaagaggaggctgcgcgcaaagcgctttgcggccgggcgaatcggttgaacatgacgagcggcactatgaatggtcgggttaatcatacagagcttcgctgtcgaagaatttccctcccgacgttctgcccgatcgggattagtgtggttatgtaagacccctggcccaacagccaatcacatcgtccatatctacttcatctctctaagcgccttgaactattctgcacccttggccttcgtccaatcctcgtcctgcaatcccctggtccgatgtggtactgtaacaaagatttgacttagcgcccataatttgccattttaatcatgccgctcactctgaaacagcctgggtgctattttaggactgcggcgcttgcaagtactctttgtctacaggatgacagtgctcagatgcctttcaataatgatatatcctggctctttgactgatttttgtttcagacggaagtcaatgcctttgtctgtcagcaattgtcaatctttctctgtcaaggttccttctgttggtctatctacttgcttgcgttatacgtgaagattctgtcaaggacgctatcagtctatatctttcggaaactcctctgaatttgaccgtcaaatactttcattcttctcggcctacatactcacgaccagtatgacgaggtcacggccatccgttctactgctcttcaccctgatggcaagcatccaaccaggactagcatatagctctttcgatcttctctcaagaagctcagacgcttgtccttcctcattttctcgctgcggcggtacgaaacttccaaatgatttctgctgtccctcagactccacctgcatcagtctagatcaaggcagctcctccatctgttgtcccgccggtaaagattgtgactatatctcgccgattacatgtgatatacagctgcagaatgttactatctacccggagagtgtcatcaagacaactcgtctgggcgatagccttcccaaatgcggcgatgcttgctgcccgtttggctacacctgccagggggacaacacttgttccctgaaccaaaaaacctccactactgcaacagaagctttatccagctcctctatcactacaacatcatcatctgtttctagctcctctgccaacacagactcctcatcgacaacggctacaacctcaacaatctcccaagcaactatcacacccgtgccatctccatcatcgacaacgggtacaacctcaacaatcccccaagaaactatcacacccgtgccatctccctcatctgaaaaatccacaaactccactacatgctcagcactatcaacctcttgtccctcctttccagctggagctctagcagcgggcttcttccctggtgcggtcctcggtgctgttgccgccctcttgataactttctgtttccgccgtgcccggaaagacgaatgtgaaatacaagaaggcaaaaatgggcctaattggtcccaacgttcttcttccggggcaagattgtgcatatcaaaccccataccccaagacgatacctcgtaccgcacagacttcctccgatgcccaccacgagccaagcgctcttcaataggaggacgttccactcgcaccgtgatccaccgcactggcagcagagtgcggagtctgttctccggttatccaaggcaaaccgctcgactagacaaggatgtgccgcctatccctatgccaaaccctatgcatccggctccgtttactccgccacgacagcgtcagccgagcacagaaagcatcacggtgtattcaccgcctgaatcgtggctttcgcaatctcgcactttgttgggaccaagtccataccctggtgataccgctaggccagataccctgtttagcgacctgatgcgggttgttgggtctcctcatgatggcaagggaaagccaccttatccgactaatgataattctcgggaaaatccgttcagagatcctgtgcgttgataattgaaggatgtgaagcctacggggttggattgagccgtgcgctcagtcatcttggttcagatatttggtcgttctggcatattgattgtgtgccacgcacgatatccatattgtattgtttcccactttgtttcgaggtacctgattaattctccatctaattcaaatatagtgtaccgctttatgtgcatggtcaatatctatctacgaacagtgacacaaggccctgggtaggtatatcctcagaaggaaaaatagttcaatgggtgtatataactcctagaatacataaatttcgtattactctacgatgctgccccgttcgccttacgtcgagccgcaattctcttgagctctttgagcaacccaacaacaagagggacaccaattggtcccagaaggggtagatagacagccaccttgtgctcatcggggaaatagacctggcccaccatacttttttcgaagaagctgcgctcagcttctgtctctgcgactcgggcgctggcaagtgcagcgccgaagcgaccctctcgcaagtggacacaagaggcactcaaatgagagagagtggtggagaccgatgtagccacggttgccgggatagggatggagggtaaagacttagtaagacgggcaagcgagcccattgttgatgaggcggagagcaacaagctggccgcgcggatgcggatagatgtctgaagacggagtggaagagaggcaggggtgcttggagtgccgaggagggtcaggagttgatgagagaaggtcatgaatgcaggacctaaagagtccagggagaggtgggaaggattagacggggcactctgctcgccggtgttggaaagcggcgggttaagaaggaaaaccccgccccattgggggactatccaactagaagcacggttctccttgacaatgagtggagactgcgaagggtctgggacgtagagaatgaaattgatcgtcgggccattgccgatgctcgggttcagcggccactcggcagcattgacgaaggcacttaaaccttctttcttcaatgtccatgccgcctcggattcatcatactcgggcttcggcgcggtgggtgcaaaattggcatagagctgtacttgagtgtcgacagtgaaattgctgataggagacaatgcctgcaggaggggggagacatattctttcaccgcagcctcaatgtcccacgaggacggttcagacccgggggtaaagagtgaaaaggagaggtggtaggtttcggcatatttcatcgatcggcgcagtcttcggtcgatatcttcggcgagttgtggtgaggtcgagtcaagcccagcggtatttccagacaagatgtgcgctatagtagccttttcctcgccatacaattgctgaagctccgccgcaatgaaagtggagaggggggagttggaggaagaaggtacggggacctggctcggcgggtagaagatatcgagctgtgtcgcagctgcatgaagctccgaccaaggacttgctaggccatcctggggcagtaatcggacggtcagtgccgtatccgctgtctctttcgcagggtattccaggttgtcttcgccgttatgaactgccgtcgtggtgccgttggtcaacttgagccgaaggtggtgagctgcgaactcgttgaggtcatcgagagtatgctgcgtcgtgcggagaaggtgctgggcttcgaaagattgcatcgaaggtgtcgcaaggtgaatatccaatggaaagactggtcggcatgcctgtcaaaattatgattagcatctaccaagtcccaaagccaaaggcgatgccgcaagccgtaccttgccatcagcccaatccaccatctcctcgatggggagagacgcccggtagattgatgttgtcttccaccatatcggaaatccaaggaatattattacggcccaaaaggctgctatcactcgaaatcgcgtttgaagggcggccggggtttctgggggtggagcgcgcttgacgctgagctggtcgccttgagaggacgaagcctgaggagactcctggtctcctgttttggtcgtcatggtcgggacatgctttgtgctctaaatcggagcaacaaaggaggaagtgttctcaagtcgattgttgaattgagggagtttgccgggcggagaagccaaggactactacctaggtggccgcatggagcaacaacagtcggctatactccgtacgacatattttttgagctgaacttttagtttcataatctcttaattaattgatttgggggtgcgatctctgcacccaatggctcaaagcaattcgcatccaatctagcctttttaaagaaagtcccaaaacgggtctaggatgccatcatcgactccgagtgctcttaaatcacaaaaaaacaagggtatattgacaagtaacgccgatccgatgtagcagtcaaaaggctaggcctccaccgctgtacctccacatgcaatgtctagtattccttctcgaagatcttttgaataggtttagcagcctaaatgtcatgaaacttattagcaaactcatcgatagcagacctggacaagcggtataacatacatcaatgaacttttcgagatcttggtcgaggttggcaaggtcattcttccttttcttgttctctgcgatcaagccctgcttgcgcttcaaaagctcttgccgcgcttgctccagcttctctcgttcaacatgctcgtgttcgatgcgggcaatcatgaggtcatgttcgctggaattgcgatgttcgggatgaagctccaagaattcttcgaccgggatcaaggggagggagaggtatttgtgactacagcaaatatgtcaatttttcgccacagtaagatgagatgctgtgagtaggaaattcagatcacgtactcatatgcctcgcaagccgcaatctcgcctgtcagatgcctctgttcatagtacaagttctggagctgaagatgtagccgatcgatttcctgtcgagcctccgcagttgattgcttggtgtcgcgcacgcgaaaaatggcatcccgattctgcccgcgaagttgggccagcagtgcgaaaaggagtttctgttgtttagatgcggctaaagataattctcggaccttggcggcatcgttgggctgggtttcggggttcaggatggtgagaagatgctgacactgcaccagagtctcagcgctagtctgaagcaccggcaagagcgactcatcggcgacgatttcactgatagccatattgtggaaatgggatgaatcggtggcgagagatgttgcgggagaggcgggatcaatcaggatgttcggggccgcagtgtgcctcggggacttagtgtggttgggaacttgcccttttccccccagcgctcggttttcccatcttacactccccctcctttttttttgtactttctagatcctctatatgcccctcattccttgtcatttaaataagctcgtttcaacccgaggttgtgtcttgggttcttctccggtctcccggtacttcttctccgctacccttgcctctcaacgcttatcgcccatcccactccgtatggccttcgactgaggctgaacagttgaactctcaactacaccccatggcttgcggcgcttcttcaatgacggcgcagtctcctgaagcagaggcatttgcctctgccactgcgacccccgatgagaataccggtatgctccgtgatcggcgcagacattcgttccatgcttctagaaaactctcgtgcgactatcaagatgcagatgcagtatttatcagggtatgtacatgcattaccagtggaaaatatacccgggaaatagtgtgtctaatcaactcctaggtcgaactcttcttatccgaactggaacgtcggatgcactggatcgagcaataccggaaatcccacatggtgcaagtcgatgccagtctgaaacgaggctatgctacgctggaagccgtgagagatcaatgctctctcgcctcgggagagttgatgggaagtggcaaaaagcgggccaagattctggttgaaaccctcgaggatggatacaatgaagccctggtgaccaaggagactctggaacaaaaggcgcaagctggtgtgcggttaatggagtcattcttggtcgaacttgagagcaaagtgcatgcggttcgcgatcgcggcatctacggaactatagatgacgggtggaaagcggtcgattcgggcttggttcacgcccgagaaatcgttgacgagggtatggagcgtgcccgccatgctcgtgatactctgcgagatactattgaggaagctatccggctagccaaggagaagcgattgatcaactacgatgaactacctcacccatggcgcgtcaacccgcacatcctcaatggctaccgattcaccacttccaaggtagaatgtgtctcgtcgattttcgccttctcgaatgaaatgttcaacatctggtcccatgtgatcggcctcatcatcgtcctagccatcgccttttacttctacccgcttcacaccaattttcacttgagctccaaatccgacgtcacaatcgctgccgtcttcttctttgctgcatgtaaatgtctagtctgcagcactatttggcatactatgaacagcattgcttcgcaaccattgatggaacgattcgcttgtgtggactacactggaatctctatgctcgtcgctgcctcgattgtgacgaccgagtacactgctttctattgcgagcccttctcccggtgggtatacattctgcttaccatgtcattcggcatcggtggcatcattctaccttggcacccaaccttcaaccgccacgatatggcatgggcccgcgtaggattctacgtgacccttgcactcactggtttctcgcccatagcgcagcttatttatacccgtggcttctcatggaccatgtatttctatgcaccagtcatgaagagcatcatggtgtattttatcggtgcctgtgtctacgcttccaaagttcctgagcgctggaagccaggtcttttcgattatgtcggtggcagccacaatatctggcacctggctgtcctgggtgggattttctttcactatcacgccatgcaggacttgtttgcgggggccttccaacgagccctgggcgagtgtccgaacatgacgatgtgaagttacgtccaaccaacctttgcattgtccattgctctttgccttttgctcatggacaaatatcatgtggtacgtggtttcgcttttcaacatacagcgattgaacgtttagcaacgtttaggctcacagtttgctacgggtcacgacttgatatggccctttgcaatgaaaaattttatctcttttacgagagttgtcaccgttgatgcccattttgcctgcatggatggtgtttgtcttgattttctactcttcttcttagagccttggattgtacataactccgatgtctctccctttcgcaccattcggtctgtctagatacagggtgtgcacaaagatttttgcttttttgcgtgtacttttgagattcttgctgcacttaggaatctacatattgtagactccctttgtcaatatctgtagaacgaacaaagactgatttcgatatattctatgtttcctttcgtaaattacgtatctctatcatcagccatgggtttcaaagttgttcttccgaatcctataaagcattaatcctctcggtatattgttttatgtggaatagagagttatcttcctatatcggaaccttgatggttctctatatggtaggccttgttcctggactgtacttgcaaattaaattccatgctctaatgtatgtgtcgtatattcataactccatcatgaagccattgccctatatacatagcaacccaagccatttcctcgcggcctttcgaggtgttgtatcagcttttcgcactggaaatgcgccaacagtttggtgtttatctcgacgccatgggtttgagatacaccagaaagcacggggttgagtccacgcatggccaaaatcacgagatcaagattggacggtgggaaagaccatcacaattattgtgacctgtacttgtcggtagacgatgaatttcctgtctttgaggaggctttggtgaatatttatagccatctgaaatgaccatcgcagaattggtgattcagatttattgagtgttctcggtgacagccttagcctcagactcagctccaccgcgctttcggaagttgccctgcatccagcagcggtacatcttttgtttggtcccacggttgacaattagtcgccgatcagcccccatgttaaggacctcaaacgctccgctgtcctttgccagttgtttggcctctgcagacagctcctctgcgggctgaggatctttcttttcctcggatgcttcttcggtggggttctcatcaccaataggaatctgcaatccgctttctgcgctccaggtactccacatgtcgatgagctggtccttatcgaagaagtaaacacgtgtgccatcacctcggatgtagaaattctcggccatgtatcgacccttcttgaatcgcacttgggcgaggtcaccacggccgtagtcgcgaaacaacacacggccaccgggcttcaggagacggtagatattgcggatagcctggtcccactggttaggggccagggcggagaagatgaagattagaatcacaacgtcgactgagccttcggtcagaccgggcggaagagagtcgccgttctcgtcaggcacagcggttgcgtcccagacatcagcggacatgtatttctcattgtagagctcgctctcgcgcatgaccttcacggcatacttggaataatcacaggcatggactctcagatgctcattctcattgttggccagcaatgggaaggcggtatttccggctcctgcaccaacctccagcacaacctggtgacccgcgtccttttgtgtcacatcagcgagaatggggaattcttggcgcagccactttctatccttgaagaagttggctgtgttgttcttatagaaaaggtcccaccacttggcggggtcttggttgaaccgattgcgatcaaagtccgacacacgtgtttcgcgctgtctcgcatattgggtctcggcaaaagccttaaactcatcgtctggctcgacgtgatcccaagcattgaactcaaaaacatcatcgcccttttcaaggtatcttgagccgaattggaaggggtcggtccgtttcaggttgttgctgggatcgtgggaacgatgaggatcgacctgaggaggctcgacattttgtgtcacctcttggatactgggatcgacggtcatgacgttggttgagccttgtagtagttctgattgactcgagatttggaattcgggaaaagaatataatcactcaagcgatggtcgagaaggcggggagaacaaaaaatttccaggcggcgacgcgattggcggggtgcttggatcacatgactggattttgcccaaatattttcttgtccctcgacccacatgactgttcaaccaatcatatgctctctattgatacaccgcctcatttatttttgggtacgtcggatcttatcgcctatcgcttatcggtcttttacttccgtggacgacataagatgctttactgaggatcaatacgtctcatatgtgctagaagctcgaatatcattatgctgatataagcgctcaaagattgtgatggctagctaccacttaggctagtaatgcagaaaaatacttgatgtatgagactgattgtttaagcagatatctttcttagcttgatgtttttttgtcaactcctaattgacttcgttgagtctcatttgatttggctagcttctcctggggcaagtatgtttcagagccaatggacgctcgatagtatctcggaaatagttgcagcttgcatatcacaattcaccgatgctagccggtgcaacctagcgaaacctagcattgtttgacttaccatgtttggctctatggtattattatgagaggtccacgttttcttacattatgagccaacccttcattgaaacagctggagatgcttttgatatccattgactgcctcaggcacctatactctcttatcagctaatcagagttcctgggaatctggatgcctgcgggtgcctcgtccggtcagctttctggcctttctttcacccctcatttcctgcctttctttctgtttgagcatgattttctagattcatatttgattcatattcttcctgtttgccggttcaggtctggggcttatcgacgcaagtggggttcagcccactatcggcgtttgaggctcaacagtcgaactgctcatacgatagttcttgtccggcgttttttgctacagaactcacgggccaactttctctcgctatagtcaaatcaatattggctttgacacagtcaattagaaaacagtctctcattgagtcatgtatttcctctcggcactctgcgggtgcttcactcgagacgagaatctctcgcagccccatccctcttcggaggtggtcgccaaaagactcagccccaacggcatccagacaggacgctttacactctccgctgaaggcgaatttatccgcccagcgtccccagcaccgccagccgggagccatgggcacgggcccccgccttctgactcgcaggatggaggctattctagcgtggtccctctcccgcagtactcagcccgtccaatgagcctccacgagaagactttggaagcccatatgcgtgatccatctatttcctccgagtctcagaacttctgccccaacgatgaaaagaacgatcattacgatggagatctcacctccgatagttcatcagccgtttcctttcccagcagctacggcaatacctccaccgcaacgagggatactccaccaccgccatactctccccgtcaatccgtagtgctgagtcgctcgcggtccatgtccatctcgtctactatggcggtcatcattaatccacctcccgctgcccgcatgagcggttcgcggactggacctacatactctgaggaggatgatcagtcccttcgtcgtcatcggcgggtctcttgggagagccgatgatagactcgtttaatacattctgaaagaacgtttgcttgctgccctttgcttattagctacctgcttaatattttccacatcgctcttttggtctaggcgatctggaatcgtggcctgtgatcgtttgggatcttccattgtcgatttacatttattttgcacgactgctgcattgttttctttctctgcttatcatttttctttggtactgttctattgcacatgacgcgacgacatcatttatatggtatgactgggactggacttggtgcaaaaagggatttcttctgggatagccttggatatttaatattgatctgcacatactcgcttgtcatagatgcaggaggacaccgtatcgagatactcggttaccggtactcactcacatccagacatagtgtaacaattatgataaaccgaataaattatactatatttcgtcaatcaaatgttccacatctagcttgattactactatcctcgatagaacaccaaccaacaaaaagggtatcaatgcaaatccaagatataaaccaatttcactcaaaccaaatcaatccaactcaaaaaccccagcccgttcctgctcatgtctaagtaaatacccacaacacgacgccggaaactctaacaacctcaaaaccaacggatcacaactatcctccagaaacatacagatagccgtacactccgaacgaaccctcatctcaacccaccactcctcaacataacacataagccccaaccaccaagccaacaaaaccagcgccggcgcctccttcctaagcaaacacccatagaacggattctccaacctccccatccaagtattataaaccttaaaactctccgtagtcctctcaaacggcaacaaccccatcagcatccgcaaaggccacaaacacggattctcctcgacggtcgtctcctccacaatcccacaaagatccgccaaatccggatcaagacccacacgcccgggacgcttatcctcgaagtccagcgatgcatcccgcgactccatgaataccgtccaccacatgctctgcgggagccagtggcccgtgcgctcgaggaggtagcgcatgccggcttggattcggagccaggttagtgcggttgggtctgttgtgaagacgaaggaggtgcgtgggttgaaggtttcttggtggaaggagtgcatgctgactatcatgcaggtggagtagagcttatccatgttggcgcgggttatggttttcgagacttcggtcgagtattggttgattgtttgttgccagtggtaggcttctgctaggcggtagtctttgttgtctggaaggagggtgcagaggtgggttgttgcggctgctattatggcgtgcatgaggaagggggtctgggttggttggtggttagtttgggagttttattaggtagattatagctgtgttttgttgaggtatggcttttagataaactatggatggacttacttcgaaggcaagttggaccattttgcccattacgattcgaacgggtgtttggctttcggttgcaaaggctggggctttgtggaaatgatgcaatgcttccaagatgcgggttgatgctgtggcatctgtgagtgctctcggcagcttgataccggtagcagagggcggttgcagtaattcattcaatttgtccgcgaccatcattagagacattgaagaggctagagaatcaatcgagatcaagtcggagttggtcttgataaactgggaaacgatattattggtcttctgaggttgaggtcgggctggctggcccgagtagtcacactcgctgccatgtttttggcaccggagacaacgtggttttgcttcatcgcacttgatcggtcattatcagcagacggttgataatgggggcgtccgaagtaccttgactcttcgttgcttacagttcacacagccggcgcgggattttcgatgagacctgcgggaatgatagaccggttcagatggttcggacccgcacgctagagaatcctttgatttgtagtttgggattcgaaagaccatattctgcccctgcatgtgtctagacgagcgtggccggggcaggggtttagattgcgtgtcgtccatcgtttctcaaagtataatttgacacggggaatatttgccgacggtctattaaatccgaagtacatagaagactatacgaacaagctggtcttaggcgtgcggggagtgtgtccgtagcctttctcatcgagatatggttacgatatagctctgcgcctgagatgtcagactggtgcaaggcgactagtgaagctcaagtctgtagaactgcgccttgttctaatcagcctggccacttcatgtgtccaaatagaagagaaactaggtggtgacggagaatacgaggaggcgaaggagaagactagaacggacgctatccccgattaggcaattctcgtattcgcagaaacaatgagaagttgaccagaaactgaataaaagacatctacttttaggaatatattgaagctatgaagacctggaattggattcgagaaacgccatgcaattcatcactcatcgaagatcatccaagggggtttaacccatcttggcattagagaaatccatctctgcaagcaggttagcaacatattgaaacgaaagaacatcgcagaaattcgagagattgaaaaggaaacaacgtaccgggatgctcagcctggaacttcttcagcaaatccatcttccgctgctcgtcactgctgggaccacccatctccttctgtcgctgatcatacatcatcttctcgaccatggcgcgagtctcgccatccagatcgcccagactggagttctcgggcgtaatcttggtgacatcgattttgggagcagtagtcacaacatgaggccaccattcgaccttgttcaccttatcgagatggatgctgatttccttgccggggaaggtgggggtagtctcgagggtccaagaggattcgtcgacgcggatggcgtgggggaagtcaccctgaacagaaaaatgggggtaattagctgactgatttttgggttggaatgtgttgatttagagtgtatggtgtaattctccgggggtggggaacagtggacatacctcgatgaggggttcttgtcccttgattgcgacgcggagtttgttcttggtcaacagcacatccaggtcgcggcccttgaaattggcaggaatcggtgctgtcacatccacatcacgaatcgtctgtgtccacttgtaagggagctgggcctgttccgcatcctcgcgggctttgcgctctttgttctcgcgttcacgttcggctaggtcggcgggggaggggttttggtcgagatcggcagacatgatggcaggtcagaaaaagcaaagatagagtaaggggggctttttgatagacggtgtaacggtgtacaaggtaggcacggagtatacggagtaataattcgtgttcaggtgaggatggaggagcaaaagcccaaaaaggaaagatgtggagacacttggcttttttccccgttggcgcttttgccgccagccctaatcgcctatgacttttgcgcaataccttctacaatgcacttgtactcggggatcttggaatttgtttgactgcataatctgaaactggagtacttgtcaagtgtcctttgtccggtttccgtattcaacatctcagggcgcggtcatttgagccgggattgcgatggtgctctccagaatgatattatactccggagcagggaacgcatatgacatcagcgatcgataaaccgcagtagcgtattccgctacgagcactaatcaagtcagaccggttgactccacaccactgtgatatgcataccggaaaagcgcgcagcagggcgtaatgtcacaataaaccacaagggtaatgtaaagaaaaagacttgaggccccagcgggaagatggcgttgaccaaccggtcgttcagacggacatggtggcgcagccagcccaggtgaaaagtgatgaacgcaagcagtgccccgagaagcacaccgcttagaatcacggtggcattgtgcgcgacgacatcgaggggtctagggtccgttaggaaatgtctcctgcctctttgggaccaccgacaagcatggcttacaaggaagggtgggcgacttgatcgttagcggcagccatgacatgcatcggctgaaaagggatctgagggtgattggcaatgcagtggacaaagtatatgtcgaacaaaccaataaaccccagagaggcaagtgccacccccacttgaggctctctctttccttatttaatttattttacatcgcatggagttgtgtcagtggagaaatataaggaaagtgtgttctcctgcatgttgccttgtagattgccttccaagttgtaaagcgaatgaccgaagcttcaaggtatagaatgtacccaaaaaaaaaaacacgctctgatcccatccatgctctcatcatccgtagagaaaaaaagaagaagcaaacaaaaaaaagcacacgaaaaagcaaacaccagaagctcggttcccaataaatcccacagcttcaacggcgctggcgctggtcgtcatcatcatcatcattattcttgttatttgccatcctcgctagttcgttctctatgctagctgtcagtttccctcttctacatccatgtcagaaaagaaacgtacctcgaatctggtcgatttgccttgcggtgtcttgaagcatctggtcccatttcatctggtactcttccacgattgttggcttgtatctgttctgtggctcctccttgggctcctccttgggtgtctcgattttgtccatggtggatatgaaagtgttcgagaatgaagtaggtatagttctcagggggctcaagaaggtggaagtgggtggattaaagtcaaatcgacgtgcgacaggaacggctttatataaacgacacgcagaattaaaatcaattaaaaatcaataataaatcgtcgacactagaaccctgttcttaatttcccaaagagaaaaaaacaaaacccaaaaatccctgtcaaataatgttggcttcggaaatagaccggtcacgcgtctaaaggtcaaggaacgcgttcaccgacatcttcccttttggagcctaaattgaaaacgggccatcggtccgcttagcctgtcttagggaagagctgaattggcggttgctgattggcgagatcagtttgtgacgggtttttttttatttttaccccttgagcaaaagtaccgtttcagaaagtgactggactggggatgatgtcagaccataacgggacctagcatagtacattctgtacaacagttgtactccatacctgatcattccaaatctgccttgtcggtacgactaataggatggcttccagcgtaccgaagttgtcccgcacccaatcgggggctgaggaaccacatccgcgccaaccgatcggatatcttgggtcgcttttaaggggtgggaaagggtcgatacgtatcatatcgaagaagaatcacaattttaaagaataaaaaatataaatatataaatatataaataaaaaggggcaccggggaagcgggtagaactggattccctcccagtgatcgcccgatccacccgaagttgatacttctgcgatctataacggagtacggagtactccgtactctatggatatactccactactttcacaacgggcaacaaaaaaacacatatagatcttggcgcccaacaccttcggccctgaagttcagccctgatgtccaacccggagtccaacttggagtccaactcggagtccaacccgggagccaaccctccaaccctggaaggctagaaggccgaaagggctggctgaatcacacggaccgctcgaaaaccctgtaccactgtagtatgtacaaggtagagcccaacactacccgggatcctgcatggctcgattggcccaaatagcgtttacaccgccgatagccccgggacgtgcagagccgtagacgttgcatctcgacaatccacgtggtttgcatacgctagcgctgtgtcatggccgttgtccttgaccgcatccctctatccatctacggcccgacacgttctgaaacgctaagatgcttctggtgcttttgtcaagggcatctcagcacagtcagatgaaaccgcagttgggatgtttgatcggggctatgcttgttcattccagctgacggaagatgatggtttaatgggcttgattacattccgctatctgaacggagttggtcttgcctgtgcattattactggctgtgattatagtttgtccagggtatcaaaccttagactcaagggttcaatatccaacacaagggagatacggtcattggtctaaggctacaaggatgaaaagataaagagcaagcggtaaaataatacctgatcctttaagatatgcctctacatggtcaaattccacattcattccccatgcaggtcggcaaatgaaagtaaaaataacaaataaatcgtaaattctggcgttggtgcctgcatccattggccagttatgtcaacgcagccctttccgaggaaccgcccatcgacagcctcagcccggtttgaagagggggtggcagaagcacgtatgcgcaatgcgcccatattcacatggtacaacgccgggttaagacatgatattgatcccgctgggatagattgcttagaaaatatttcataagagtagatagactcccatatgacgccagtatatgagatcgctgaaaaaaccgagagaaaggaaacaggaaaaaaaaaaggaaaaacaaacttaggatgagaaccatgaaagtccgaaagtccgaaacggagacggtgagcagcgcctcggactaattcgagtctgggaggaaccagtcaaggtcatcagactcgaaatgcgaggcggatgtttccggtactgcaatgccaccttcgaaaggatcgacaatcccgtcatcaaaagggaccgttgtctccgtctccgaaggcagactgctgcgccgctcgacgaggtcaaagaactcacctgcaaactcagctagctcattagccactttgagctccaggatagcttcaagcacttgcatttcctttttccatttgcgatcacgctgcgccttttcctcctggcgacggcggcacaggctgtcacgagggaggtccgccacgcagttgggacacaagtaagtttcctcgcaatacgagcatttgcagggggaatgagtgtatatgcagtccgcgcatacatacaccctgcagcctttgcattcgcgcagatagctagagcacctaggacgtggatccctgataccgcctcggacatccctgattccggttataggatcagccggggggcagaaaaaggattggcaaccttgccatcgtggttcgaatagcggcgaatcaaagaaggtggaggatgaggatgagggaggggaagaatggtcagatgcaggggccgaaaatgagcgagttggttggttggagaagaaggaaacaggagccgactgatcaccaacatgtgattcgggtgtattttcctcgtccatactatcctggcgtgaatcgtcaatgtagcttttgttggtcgagtcaagaagctcctggcttctgaatagtaggtcgtattcgggaatttgactagaaataagagatcccgaaagatttccagcccaccgattttgaatgatttgcttttccgtctcaaggtctcggtagccgcaaatccttaggcgaagcccgcggaggtcatgctcaatacagagaggccttgagcagctcttgcagtgcaccttccactgtggtgaatcgtaacatccttgacacaagttacgcggacacggtgagacttcccggttaggtggtcctaggagccatttcatcatcgccagatgacccgtttcaagcgagtagtccggtttgctcggatccccatatgcatacttggggaacgtcttgctccattcactaacggtgtactctagatcttcccaaccttggccacgaggcaaaggcacggctcgtacttggtccacctcaccattgcgaggtccgatgctaatcccaccgcccccagagaggtcaggcttggtgcagcaccaatggaaattgaggataggtggtgggtccaatcctgtaccatggggttgatggggatcggtcagaatatccacgggatcctgcattgagcctggagagtgtgtggcccctggtgcccaccagaaggaacccggtgcgttctgggctttttcagacgaagatgttgtgcttctgtgaagatacggccgttcgtgggcacagcttgcgcagagtgttttacggcatccgacacagtgcatcaggacgctgcaatgttcacatcgctctgagatatcctcgaggcagttgtcacagcggatcttgtcgacaaattgggtatgactccggcgcatatgggcaggcgtcattttgccttcaccccagtcgataccctcgccagttcctaatgcctcgccataaaatccagtgtcgcgattctcccacagctttccatcgtatacgtgtggctgagaagactccgtttcggttgggccgatccaatttttggatctccagagtcgatcaaagaccacccaaacttccggcgaccctgctccatgcgggaacctcgatttgacataaccggctctacgagcgcatctaccggcaggtgtggtgcaccaagcggtatcagtccaaatgcctagcttgtggcagatattgacaagttcatgggtcgactccgcgtcagcgtccttccgcatcagtgaggatgatagataagggcgtcttctatggtgacgacagcgataggcgtagatactcttgagagcaagctgttgcatcccgggagagctgccggtgttattctccatgtccatgtcacactgcagcgcgaacatggtcaagaaaggaacgatgtgatatttcaaagacacattcttgcagccccgaacagagagatgtaccagcgtctctcgacgtgaatgcagcacggttgaggtcaggttctcccccgaaatggccgtgttatccagttctaggcttttcaaacacctactgaatgggataaccacattcatcaggaacaggtctagcgcgtaaggcctagattgacgcgcgggcgctgtctcaaggccgcttgggtcattgatttgaggatttggcagagtgcttgaaggaaattgtaggcgaaacgagagtgacttccatgcggtcggatatgatcgaaggaacgtacggaggtaatttgaagtgtgatacagttttatgatggtatcggtcgggatctgaagtaataaagactcgaatataggtgcatttgttgttatcactcgctcaaaggtggacagggtccgttcttctgggataacagagtgttgtaaggcattttccagcaccgtcgggtgcgacgctggatcctcaccagcagcattccccctagccatagtgtcgagatcgtgattcgtcatatgttctgggtgaacaaaagatgccacttcttaggtcgaagatcgaaatggcgcgaggtcgcgagctcggcggttagagacgcggcacatgataagacaacttgaagatgcaatcgaggggggaagcacaccctgaggtaagccaccatgcaaggccattaaaggtaaagagtcgataattgaaaagatcaggtagcaagggctgacgaattggggtatctgaagggggacggagaaagggaggggtataaaaggaggggaacagacgaaatccccaaagagaggggaaagcaaagaaagagagaatgattacttatgcccctatgacgctgaatcaatgaaaggaagcaaaggcgtaggaaaacaagtgcaaagggtgagcgacacaaggtgatatccggatgcgcccgttaggagagaccagcgtcatgtgatagccatcaaaccccggattttcagtcgttcatagattttgttatgcataggaaatacgatgcactgatcgctgagtctattgcaaatggtttctatgctaggccatgtggactaatgtttgtcggtcgcatcgcctacagtgtagcccctcgcaatacccttgcgcccttccttgactagggtactatcatccaagtcttcctcatcatatcgaatatcaaagtcgctacccagacccttccatgtccgttgagatcgcaagtattcagcccctggtgaaaaggcaccgccgatcatagccaagtcacccttagctcgtcgcgccagtgccctagcagcggatggcccgctggtggatgatccatcaacttgagaagcgcgaggcgcgggatcccgcattgggcgggaatgtgagacgtatcgaccggtccgaaagtcaaactcaggcggcgccgactcgggttctgacatgtcgtcctcatcggacatggttgtgctagtggatgtctcctggtcatctccatttccgttgacctcctgggctggtgcgtcgaggactgcctggaagtcactctgccacgctcctgtccatacccggtctgagtcatttttcaaggccagctctaattcgaagggagtgatgactggcttccagaaatccttgctatccaccaaagagctttcccagcagccaatgaccacccaaccaccgatttcactgaaattggctaccttggcagcattcaatttgccaaccacgaacatatagctcttcttgcctgctttggcaattcgttccttgacatgttccacaatatgcaggtagttcttgacactcaaagtgttgataagaatgccccagataggcacggttgtcagagaggcaagagtgccataccggcgtcgcaaaaccgcagtagttgaagcaggcaatggcttaacgttctcatttgaaaggtcgttggtaggataaatatggattgctgcaacgcgagacgcgagcgtcatcatgagggctgttggcggatcggatatgtgaaacagttgccagtcggccagtgtctcgggcgcctctcgaaccgactcgggaactgtgcgattgggaatcgatgatgaaggttcatgaacaacttccgttgcatatatattgctatatccctcttccaccaggcgagcgtataccgtaggaacgtggtctgaaaaggtgacgtcggccgcgatgataaccttggtcgttggatcaagataggttgccttgaacgctcgtatcactggttcaaggggcagatccttatgtgtgaagacatggatcacgggtagacgagctgttggcgacagacaggacctcccgtaatgtacaaccacatctgcgtccacatgttccgcggccacttcgtcaacgcagcaggtcccgtaggatgtatcggccaaaattgtcaaccgaggagagtgttgttccgttttatcctccacctggagctccgttatcgagtgagcaaggtcggtatcggcgttgctagggtcggtttggttcgagggctgtgtgccattggtgccgacttcttcgcgttccaggccccggctgagcaattgaaatactcgcggagcatcaggaagcatatcatctgggaactggagcgcaatgcgcttgtaccgcgcttgccgaatatccttcaatgtgcgctcgatatcgtaggtaatggaaagttcatcgtctgacactggagccgttgggtctcgcgtcgccactagattgatttcttcgagaatacgatcatcagcagtcgacagcacaggggctgacttcatttcagaccccatttttgtaagatagagggaggaagcgtggtagtgaatcaaaaacgacgaaaaattgcaaaagttttggagaaaaaaaaaagatccccccaccaccccgccaatggataacggtaaaatacaatagagcccattggcagacagcagaccaactgcctagagagcgaattttggtgcaaacataatcaaattattcccgaactacagagctatttacgcatttcagcatttcgacataaaaaggcaaaggatatctacaagtccgcccgtgctggctctcccgcccaaaccctgcgaagcaactcgcggatcggcgcgcgttcaatcgggcgaggattttagtaagtattggatagcgcaatatcagccgtattattgaggtctccttccttaatcccgtaatccttcacgccacgcgtgtgggaaagattggaaggacatgcctacgctgcaaagccaggcaccatacaatgccttggatcatgcagattgagaaaataggttctcaataatctcggaaagggaggacgcaagtgcccgtatgccctcgagcgccatgttgatgattgggttggtgttgcgcacgtagaaagcctcggccattcaggaacatattagattcgtgcataggaagctggtgcagattaatcaagtcgcaatggcgttaacaccgctagtggcactaataggcaccggcaaggtcattgtgagctctacattatagatgaccgtgtcgggcaagattctgggctccgactgagtcttcttcgatctattggcagtctcacttagaatcggagccatttcgctaatagtatatgcagtcggaatacaaatatgcggtagtccagtgcgaatgctgatcgccttctgaagaccgatagtgctttcgcctccaatggaaatgaccgaatctgctccctggtccttcgcatacccaagagccttgtgacattcatgagagtatgcatagtcgcacccgctgaagatacccgtgatctggcccttgagcaactctttcgctttttcggcctgaccgatctgcaggggtgtcgagagcaccagcggggccttcacttctggccaggagatctcatcggcaaatttttgcagcgtgtcgctgccgaagacggacagggtaggaattgtactcgaaggtatccattttgtgtttgcaattatctgaggggacacttgccatcttatagtccgtacccccccggcattcaagcctgtggggttttacgagaagtcgtaatctgggattatccgagcgatgcaatggcgaattttgcggttaatattaaatggccggtttgaattgtttgggtacgctcggttcttgcgtagctacgggtattccgatcatagtgaacatactatggacgttcgatccacaggtggattttgtgcctggatataaatttccgaaagtagcgggtggggctttgctgcatgagtcccaaagtcgcttttatgagactcagactcaggcttggattccagtacaggctcggactccgtgtaatccattgtattgattgacggaaaacttgaatgggtgatgggtgatttatagtgatacataggcaaactaagactagcgaagcccctctcctgtagtggtaaatcggatcaagttatctatgggatattcaaactatcctggctcaatgcgctctaaactattttatcgccggcaaaaagtcgatgagcggagcggcaaggatattctcgcggcggaaagcgaaagcactcgagctcatgccccaacggagtgacaacaactagattgttgaaggcagaggatctgcagatgtcagtatgtaattttcgttctatggatcacttcgggtcggccctcaagtacccacaagccgcaaccttggaagtttcggttcctattcgatcacattgatatcaccgttgagactcgaactaatcaacatacgtgtaaggaaggtaactgagacatagtaattcggagctcagaggtacagcgaaatttaacaatgcatattcaattttcggcttctcatactgtattattagtctctattatagattctcaaactaaaacacacacatgaggcagatacacggactacagtagtggctgttcaatcttgagttccgcttaaggagctcattatcttcaaatgcctctcattcttaatagaacgttgtctatatgtctgaagcatcccactcacgtgatagggtcgtccaaatgtgtccatcagccccggtagatcttcctctccactctccactcttctcctctcgcatctgtgcacttctatggttcccaagtgaatgaaattgaattttccttttctgatattctttgtgcctttcatagaaaaatcaaacatacaatacatctcccgaggtcaaaatcaacaaagtctatatgagtggacacaaggaccccgaagacaccagtgagcattgaccaccaggctgtacaccgaattgatctctaacctcagattctatttaactcagaatttcattattgaggaatgaagactacaatcaattgagagacccagacgattttgcatattacctgtcgcaatttcagcgttgccaacatccaccaatcctgcaaatggacaaaatagagatgcaaaccgatagcgggccaaatcttctcgcgaagcgcatggcttgtgaagagatggatatctctcctggtaccaaaagagctaagggctttcatgatgggctgacagaggtggttatagctccagctataacccggatagttcctttccctgagaaggtatgctaggaccttgaaatgccaatcaacattctaactgttctgaagcctgcagttttggaagaacgaaatggcgagatcgagctacgagttgtcaacaatgatggctctagagagagcacgattatccttacaggtcttaaatgcctatttcaaaagcaacttccggaaatgcccaaggattacatcgcacgtctcgtctacgatcgtgctcatttatcgatcgctatcgttaagaaacctctagaagtcattgccggtatatcatttcgggaattccgagaacgcaagtttgccgaaattgttttttgtgcagtctcatctgatcagcaggtgaaaggatacggagcacatcttatggcccatttaaaggactacgtcagagctacttccccggtgatgcattttctgacctatgccgataatcaggccattgggtattttcaaaagcaaggctttactaaagagctcactctcgagaattctatctggatgggctgtattaaggattacgaaggcggaacacttatgcaatgctctatgcttcctcgaatacggtatctcgaagttggtcgaatgcttttgaaacaaaaagaatccgttctagccaaaatacgtacctcgagcaaaaatcatatcattcatcaaccgcctatgcaatgggctaacggcgtggttcccattgatccactctctatccctgccatccgggcaactggctggtctccggagatggacgagttagcacgacaatcatgccacggatctcgtttccgcggaccccatttcaacgaatttcgtcgttttattaacgatatccaaaaccacaaacaagcatggcccttccgcaatccagtcaacaaagaccaagtccctgattattacaatgtcattttatcaccaatggatctatcaaccatcgaagagagattagagcattacactactccgaaggaccttctcgccgatctcaagttgattttcagtaactgtcggcagtacaatgatgccacaacggtgtacgccaagtgtgcggtcaaactggagaaatacatgtggaaactgatcagggagattcctgagtggtctgacttgattgaagaatgattgctgctagtgcattctttggggtcagctgtgcgagggttttgtatggtgggagtcgatatcggatttgagaagctacacggagcaaggtatcaatgattcgatatttcttgcgatttttagcccctaacgcccctaacgcttagttgacgttcccgtggacatcagaataaactagagccaagtaagggggagacatatgtatgtacatatcggagatatagatattcttcctctaattggcccttaaaacccctaacaccaacgctatgtacactttttcttgttttcgggctgaacaatcgatttgcagatgtgggtatcagagaatgggatattgagacattagtccaagtcatggaacgccatgacatgctgtccaccagtgcggtccttgcccttagacttcttgcgcttctttcggtcctttgtatcctcgcgacgttccgcatcgctgttatccgaatccttgtcgtcatcactatcatccatgtcttcgtcgccagatccttcaatattttcctcagcctcgtgccacaccttgacggtttggccaccaccagagaccatccggccctccacgtcaaagcccaagcctacaacaccatcgatctcatcgtgcacaacctcggaaacgacttggttcggtccaatgcgcacaaatttcacttttccgtttgagaggcctgcggccacaaccttgcccaagtagtcaggcccaactgccattgtctcgatggaatctccgccatcggcattgcggtcgacgtagatccgctcatcctggtcatcccacgcgcccttctcccagagagtgaggataccgctggctccaccaacaatcaacttctcgcctctactggttccgctggagggcagaccacccatgaagatcgagctgaccagttcttcttcctggttctcgctgcgcaccagaacgccccttcggagatctgtcacggccaaggttgttccaccggttgtaacccactgcttgctaaagcccgatgtgctagtttcggaagccggcagaggagtaagagaggagatgtagtcgtcatgggggtggtgcgtttgttcaggtcgcgcggacaccttagaataggggatacggagatcgtagagatgcagagcgctcgagtcggtaccgaggaggagggtttgaggagagagggcgtgaatcatggttggcgcatcaatggagctatacgacatcaaaaaaaacgagaggtcagccaaatgcaaaggtctggatcgcaacgtttgatattcgggagagttcctttacccgttcttctcaaaaggaatcacaatcttgttttgcacctgaccagtctcactgattgcagctttcaccataccgtctgtaccagccgagtagagcatcttgccatccgtactgaaccctagggtgcgacagctacccttgtgtcgccgagttctccacattgtgtcaatgtggccctttccggtccgggccaacgaactcggtgcggcatcttcgtcaccctctccttctaaggaaggcagtcggaaggtctggacgtggcccgaggctagaccgacagagactacgggctcctcggggtggatagcctgagcgaacaggtccgaggaaagcggaagcgtgcagaccgtgtcgaacatggttgcgaaatgcgacgggggtgagcacgaaatacgaaggcttctagcgagcctactaaatttttgaattcgagtgaattgaatcaagagaatcaatcgcaaaaagctgtagcttcagagctggccgtttttttctgccgggccgagaataccccgaccgccttcttacttgttcagttcaaatgagcctcgattctgacaaacagctctgattgtaagaaagataaatgaaaccaagaatacagacaactatcaacgaaagagatttatacacagttcaccattctcttccaaatttggtatttccaccactggctcaaggatatatgcagcacggagaccccgcattccattccaagtatagccgaattcagcaagtgaatgtcatttcgactctctaggaagaagcgtaggtggagccaatggggccgaccttgatgttagagtaggtcaccttggccgagcccgactcggcctcaacggttgctgggtcgccggaagtggtggcgcatgtgccgcgagcagcaccgggatcggaggcagatgcatcagtggggtagacctccccatccaaccagagcatgttagcatagtggtcatcccacaggctcatgacaaggaccattccctggtccaacccctcgcccatggtagccagaccaccgtgctgggcgaagatatcctcatcgccgaaggctttcttctgggctgtgcagaagtcggtggtgatcgagtttccggtgacaccgctaacatccgaggctgagttggcgatgacttttccgtcctggacgtagatgcgcttgatctcgctgagggtgccggtgtcggtgccgtcgctggtgatgaactgagtgaccacggttatcttggacttagtgtcaacagtcatgccgggaccgaagaaggtctcatttcccatgcggaaggagttaaagtcacatccatcgggatcgcaggttcctgcgtagcgggtggaagagtaagttccgccacaatcatcgccctcgcacatagtctgttcagggctgtcgcaagggtgaggcgtgtaagcagtggaaatgctattggcttcccagatatccatctcagggcagcaagatccatggccgccaacaccagcgttcttgtcgttctcggaaggcacccagccgtccacgttggcctgtatcgcgcatcagtcactttgcccgcaaaccgttcgaattgaccagtataaaaactcacctggccgttgatgaacttcagatcacgagggcactgagaatcgcaatagccagttccgtacttggcacctgccttgttccccgtgtacttagccaggccaccatcggaatccatggagacaaagtacagagctccattgagtccgcagggcaacccggaagtatccacgtcgaatgtgaactcctggttcttcagcttgaatatctggtaggtactctcgtcctccatcaggtacagacgagagccaatgttggcgccagtgacgaagctcaaagtgagggcattgccatcagtggtcgcaccgtatgtgccggcgtagtcagcgccgtccaacgcacagttagtggcgcaagtctcgtcatcggggcagagagtcgcatcccactatcatcaaacaagtcaatcaatgtgaacgctcaccttctcggttgaggatctcttacctcgtttccagtgtagcagttggtgtaaccatcgacagagtgaagccaacgccagttggcatcaatgacaacagagccctgctggtcggtgcaactgcccgcggtagtgcacttttgccaggtcaaagagggatgggtctcagccgtcaatgtgccagcttgctgggcacgggctgcggccgccaggacggagaaaaggagtgcgcgttgatacattgacaattaagcagagaggtcggtttgcaatgtgtccttggtgtcttgttgtctggcctgctgctagtgaacacaaataatctcgggtgggaatcggccattatatgtcttttctccgtgcaggatttctctgggccgtgactaaagtcctttccatagcatgatcgattgacggaccgtgaggccgttaccaaattggtattgatagagagcccacaattatcaatgcagggtcaaattccatactaggtgacctccggcgttgtaggtacgttaatttgggactggaaccggcgcctgaatcaggaagggaatgatcatcactgggtgacgctttgttataggatgtctcaaaatcctgactaatatcggagtagataaacatgcatgttaatcgtttcaacacccgtgaagacggagtatgccccgatcatccagttctgtcgattgctgtggaagattcggggagcttaacagtacaaggatcaacacaaggatcaactgcaaatagagaccttttgaggtatttttcctatcgatctttcgtatacatcagggcgaggataccagacagggaatttggccataggattcaaatatgctccactccgcacagaacaaaaggccatgggacagttggtggcgttgaagggcgttaaagcatgccaagagcgcttttagatggaatgagcgctacttacatcaaaccttgaaaaggctctctttggtggcagataatgtggggtaatatagacgaaggcgttaggcccaaacacggaggatggcctgcagacccttcggatatgaagcgtttcagtccgaaactagattatatacccttgcagtaccagctgtccggagtaattatttgatactggactgttattatcctccaggttcataacgtctgctctattttttgatatagctgctttctttcaatgattctctagagagtcctcaactcgtcgtctctttgtaaacacatgaatctcaaaccgaggctctaaataaatctctgcataaatcatgaccactttcaagtttccttgggcatttctagtccggaataagataggctctagttatgcacaatagatccacagcgcgatggtctgatggtatatcacattggactaattgcccaactcgaagcatcggaagtaaagaggtacataagtagaaggacacatattaagtcttggctattactgtgtatcgcattgccggatccactaagttttgatttagaagtacggcaaagccgttgtttcagcctgtttcgccagttcacaattctaaacggtagcttgtaaacaagggtgcaatatgacctctgcaagtgattactggaagggatataattttaccgaacggaaagagcgcaggctgatcccccgtgttctagtaaggtacctggtgacaaccctataatccggtggctttaaaaatgtatctttgcctgttggtaatgtcatttagcttaactacccttgttaaccgattttacccggaaatctctaagaagttatattcaagggtacactgtcctgcagattcaaagcgcagatggccaaatccgaccaggaatttgccatcaatatacaagccaagtatttatgtgctccaatggagcccaaataaagtgcctcctccatgagtagacaaatctccccgggcggttatgtggctggagattcaccagccattgaacatggaatgaacaaggccttggacaggctcatgcgtagagatatataactagagcttcaaggatgactacatgtactatgtccatcatttcctgtcatgataagttccttcagggctgagttgaataagtctctaggctgaatactttcaaagacataggtagggtaggtatgtgaataggtagcatcaacgttatatcgatacagaggaaggattcctgctgccgatgcgaaaaacgagcaatattaggatactttctagccaatttcatgagtacctagtcatacccagcttctcacatgacgctattgaagttggttgatggaagggaacattctcaagatctatatgtagagaggagagaaaagaacgggatttattatgaaactgactagttagttatatcattgccactaactatatcataaagtgaatgaagcaaatagaaaaaaaaaagaaactccgatggggggattcgaacccccgttagtgctgtgaaagagcacagtgataacccctacactacatcggaatgttatacaaatttcagagatcgaggtatagttattccagcttttattgatatcaccctaggtattccggtgaaaaatcctataatttactacaatgtcaaaatccagaaaggagggacagcgtgcgcgtaatgggtatgaagacctcgtgtcacttatcagttatttgcataagaataacgatcctcaggcgcgcagaagaaaaattagatacaaaaaaaaaggcatgaaaaaaaagaagttctccgatggggggattcgaacccccgttagtgctgtgaaagagcacagtgataacccctacactacatcggaatgttatacaaatttcagagatcgaggtatagttattccagcttttattgatatcacccggagtgttgtacaattatattctaattatgtcttactagatatttcccaaaggtaggtagtagcaaactcctccaaaaagcagcacaaaagataccaaaaatagacataatgtcataaatcagatattgtagccgggattatatcgatagataagcattataaggtgatatagggcgcgtagggtgtcgcttatggagttgaaaaatgcgctagaatgaaaaggaaagcgtaaggttcaagagcactatccaaccagagttttatgccccggtggcatattgagcttattccgatcatctgaatttttagtatgaagatgcgaaaagccgttttcgcactagatgatgtctaagataaatgaaacatgtcaatcctacagagtccagatgaagtagaagacacacttttccattataggaagtactagtgaatctccagctcgtactgtcgacacaatagccgtgatattaaatgataattccacttcattgatggtaaaaccccgggagctcaaagaatatgcggcaattctcaacaaagacgtaaaaataggctgagccggactttactgagccataggcttctcatcatagtcctaatcatagtcctcatcatcctcctcgtcattgtcatcatagtcctcatcatcatcgtcctcataattgggctcctcgtcatcctcattgtcgtcctcatcatgatcgtcctcttcagcctcctgcgcggagttgtaccacggaacagcagcatcttcctggacctgagtcaattgtcgtgaaccattcgttgcgacttgaagaccatgtctcatagtgtgttgaagactggcgattgtagaggtagaagcctgcatttaattaatagccacctaggggagcctcagtattgaagaccactcacatgtccacagctcggtacacaataatgaaagaccttgccatggcacacaacgatttgaccaatagagttctattcacgcaattagaaacattttccgaagttgattctccttcgtagagacttacggtcgtgtacggtgggagcttcagctccagggcctcggtcttgaagaggtgctctctgtacatattgcagctttgcaaagagagtggatagttataactatccagtaagagattagggggatgcattttgaagtctgcttcaatctcagaattcttttctgatgggagggaggatgaagagggaaacattgaggagaagagttgaaatgttctgcgcagctccttccttgccgactacaatctttccctttccacatcctctctttctctttctctttctctttccccttccccttctccttctccttctgcttcatcctccatctgttttcttttcttctttttgagactccatcttcaaacagcttgactctactcttgttgccccccaactttcccagccaacatgggcttcttgttcgcaagcccgagtgatgtgacgctcatcatcatcgaagagagcgagaacgacgaccaccaaaccaagacagccttatttcacgttgatcgttccaaattgattgagagcagtgattactttcagagaatgttctcatgtcggtgggaaacatccgggaatcacaagcccactctcagaggcgacacgatcaaaggcatggaggtgatattcgggtcgattcatggagtcgagatcgagccagagtttgtcactgttgcggatgtctggtacacaatcaagacctgcaacaagtacctgctggatcctaagaagctgatgggctggtttgcacgctggatcaaacatattgacgagaaacaacctgaaatatgggaagactatgatttcaaccgccagctactgttaccttgccatttctttgatcatgcagaggctttccagcatatcacaagaagactcgtctacaacgccccaggccatatcacagaaatggccccgacagactcaccatcattcgagccgatgcatatgcccgccatcgtcatacgtaagttgatccagtcacagttttaagatcaaaggacgctaactcgcagaaagagcaattaaacgcagctagagggcgtctccgaacggttctccaaagatcgctttttggagatttgaacatgactctcgataaagctcattgtggctgtgcagcagaaagcatgtttgcctactttagagaattacatcacatcagggtcaagccgctggatagtgacatatacaagaattgtgtcagtgatattctcaatcgactggcaaacttcaatgaagacaatatggcaaagaggaagccatcggtgcagagatgcgtggtatgccccttctcctggaaacgcacggtggagtacgcacgaagactggtcgatggttactttcatggcctatgtctagattgcatgcagaaacacccagacgaggattctgagtactgggatcttcgtaccaccagattggtgtatgaccaaacttgccgcattacccacggcgaggcaacctggttctccagtttcatgggccatcgtaacaaacggctataccgcatacgttcctgagtgaacaggaagggatgaatctcgacattttttccgtgacgttactgatcatctgcccgggattttgctgaacaatcctacgcccatttctctttctgtcaattggtacccaccctctaccgagtcttgcaactatgtttatggcaaattccaatttctcaattgacggcagatactcgcaatgttagctgcccttgagccatgaattggcgaatgcatgttttatcattttgtttagagtaataatttgactgctatttgccattaatatctatttctctagaccgtatctttcaattctatgtgcgacacctacatacgacgtattaccctacaatatttatcttagacaccagtgataaaacagtcaagtttaaaagaacctgtgggatgagtgcgaaaacggctctttgcatacatcaaacaggtttcatgctaaatatgcagatgatcaatatggctaactgcgtaagaattgtcattgaaagattcactcatacttttattgtcggcttgatttgataagtattctatggtatgaatatcgacttatactggttgaatagagaatcaagattgccacttatacagatcatattcgtatacatagaaaccagtgtgataataaagcttttgttgttcgctgtaaacttctccctataccttgaatatacctactcatttcagtacgaccaaagagattcagagcctattactggaaaaagtaatttgaaacatgtctagcacttttcagattctctttgtgctggtattagtgggtgattttctttaagttcattgtggtcagacaaagatttgatttttttagaaaatatgaggttcagctaaatactattgaatatctaatgataatttgatgtgacctatacctacggtgagattaaaatgagatataagtggaatgtattcaaaagacggctaaatatacaaacggacaaacaaagaaacgatcaagctagacatatcgtgactcccaaacagttactgaatgttcattcaagtttgaattcctggcaaacactggtcattaagcgtgaatagaacaaagagctgcgtattcattgttgcatttttgccttcttcatggtatattacttcccaagagaccgagaaacatggagattcccttgagtctcttgaaccctaccctattgatctgatatagaaatcacaaatatgttcgaccaactggtgctgggagccatttttgccggcctcagcagcattggcatttggcattctgttccgttgaccggagtcactccttctaactctttcttttggcgcagtcttagctccctagaaattgcgtgttccattcacgagttacgcaaagtccatcctttggtcttcccccatgacgacgcaatctcagaacacgacctccttctacaactttcactcgatgcccaacagtacgaaaatgccaggctggccctggaacactcagctgaagctgtatcactccatgtcaacacccccggagttacagcaacaattttactcccgagtgccacagcgatgccgacgtcggtctatttgaacgatgtctgggcaaatgagcatagctacgatgagctgcaacagttccacccagcccagaataacacgctatatttcgccgtgatggctactctcgtcttggttatcctcacagtgcagataatgggctttgggatgacgaataacatcaagcagcacgtcgaggacctgcaatacgattattttgaccgaatgagcggcgtgcaagtgcaattcgacactctgatgatagagattcgacagttccgaagggaaaatgaacaagtacggcctgttttcgttcatctggcggaggccatcacaaactcctcggccgacctccaacattgtttgttacatattgttgggatgatggaagacaaatacacctcggggatgattaccattgaatccaagttggatgaggtcagtcaacaacaccatgatctgatgagaaatactgaaaatttccctcagattccgagacaattagcttggcttaacatcctgatggcgaagaacatgtccaacgacctgcctgaaggtgtacacatggaccagcctgatttggatttaagcaagagtcctagcatcgagcagatcaatggagctcaccacgccgcagggcaacccaacgggatttccaactttgaggggagtcccgttcttcagaatggaaaaaagaggactagttcagtgcaatggtcaggattggggctgacttaggacatgtgaagatctatttcgtatctgtataacaggggattttatttgcttctctttttttgggtgtatgatttagttgatgtcaagtgcttgggatagaaaagtttaatcagttggatatttcgttatgattctatattagttgactatgcctttcgtatttgtaagcgactgacaatcatgacgcggtttcttcaccaagatacttgcgacaggcagtcttcagcatgttgatgcgcctctgtgtatgaatgaagacctctcgatacatgtccagactctgctggacgacctcctgtcgggttttagtgcctgagcagatctcaagcattctcaattccatttccttgcgaaggaacggcttgctgagagacacactattagggagaccctcaacaacgttgtcatacccctccacaagggcaacacctaaacgggtcggaatgaattcctgcactgagctacgcccactgccccgttgatttatggcgacgtattcacgttctttgatcttggcaatatgctccgccatcgtggcatctgtaccaatcccgttggcatccatcaggccaatgagctcgggctcagtcagatagtttggagcagttgttttgccttcgaagatattggcttctgtgggctcaaagagctcccccagttcaaagttgggaagctgctggctgctttcccacttatcgtagacgtatacatccaagtagtttctctccaacacggtaaggccattggtgtggaagaattcgtcgccatattgaatttcaatttctgtgctctggcccttcgcgtcatcagaacagcaggcgaggaatcgacgggcaacaaattcataaaccttcttttcattggcattcaactggtttggtgaaacccaggtgacaggatgaataggtggatgggctttgtcattgtggcggccagagcgaggagtcctgaacttgccatcaataagtctagataggcattagtcttgtatatgaaacgcaagtccaataagcttactctcgagcgtattggccccatgactcgtcggggtattgcttttcgaccaatttcttcagatcgatcgctttgtcaaactggtccgtctcggttctgggatagctgatgaatcccttggtgtaaagtccttctgctacctttgaacgtgttagatatcatccactatgaaaatgggtttcctaccttcatgatagtctgactgtccaaacgaagaaatcgactgcccatcatttgcaggtctaccgtagtcaagggcaacggtcgccatttgcttgtaggcttctggttcacttttgtgactttggcttgctttgcaaccaaacatcgctctaacatcatcgtcacaactgctcggtcaaataaatgtacccgcttccagagaaagttgacctttttgctttcccggctgagtatgaccttgaggccccaaaatacttctggtttgaaattctggactctcaagtatcgatcgacaacgaaccccaaagtaggaaattggcaggatcctaacttgttaattcacttgcttatatctatgacgaccgacggcttaccatagctaatgaccttttccttcaaggctgccaccactgtttgtagttgtagagtctgtaggcgggtgaatgcagcgccgattcgaagatccagttcgatcctggcagatacagcactggcctgatattcgtcgaggttgactggttctagagcagcccgacgaacatgtctatcctcggatcagtttgagtagacaccaaaatcaacattacttacgctctttctgtgttgctgaacttggctcgcttaacctcgatccgggcatttcctgcctttgcctggttacggacctcagaaccgatatgctcaccttcgcgatcacaatccgtccaaataaacagggctttagagtatttagcttgattccggatgttatccgcaattggtagcttgtcctagtgaggatatcagcatgcagtcaggacagctgctggaatttgctcaccttatcaacagtctcttccacgggggcctcgaagagtgaccctggaggacaggacatccagcccttgtactgacggtcaaagtccaagccagtcagatggccgactacgctggtcatagtgaccgagcagttgccccaggcaccgccaaaatcaaaatcaaattcataattcttcacgtatttattcccgcgaatcgcatgctatgctcgatgttagctaaatctaccagaaatctttaaaaggaaacccactgtttgaaaagcacctcccgataagtgagtggccactgcgcgagcaatggcaggtttctcagccacacataggattttgcgagccatggcgagctccaatctagatcacatggggttcatagtgatggtggtcttagtgtcctgacgtcgatcacatcttgttctggatgagaagagacgagatgcctgagacgcgctttggtgcctgaggcatacaatccattttagggacgctattcctaatcggggcaattattggccacttacccgtccaactccacctgagcaaacgcttctgtttccctttctcctctgcggcattttgttcccatatatagtacgataatggcatctttaccacttccccgtgtggactcccttttggattatacttcgtttcatctcaccgttctcccctacttgacccagctgcaatggctacccggaagcttgcgcgaagctggttacgatgtgtatagcttgcgagctgtctatctagctaccaaccctctggtctctgcgcttgccttctgtggaactctggctggtcttttcttcatcgcagccgagatcaaccggaactattctcaagtagaccggttttggagcattctccccgcgctgtataacgtgcattttgccctctgggctcgtttgtccggcatccagacacaaactgtggatacaatcgccgtcgttagtgttatctggggtgtaagttggctattcttccgagtctttacatctactgactgactgactgacgggataggctcgcttgactttcaactactggcgcaaaggaggatattcaattggatcggaggattaccgctggcagatcgtgcgctctaaagtgaacaataactttgtcttcatgatcttcaacctcggattcattgctgtggctcagtcactgctgctccttctcatcaccgctccgacctacatttttgttgtcgccgcatacaaccagggacccgagacctttggccttgctgacttggcattctcccgtgctgcgtttttcttcatcatcattgaattcttcgccgacgggcagcagtggaagttccagtctgccaagaaggaataccaaaccaacgcgcgtattcccgagccttacaaggaccagttctccgctgaagatcttgagcggggctttgttgtcagcggcctatggtcttggtcacgacaccccaactttgttgctgagcaggccgtttggttgaccatgtatttgtggtcctgctaccgcaccgagacttacttcaactggaccggtctgggcgctttgggatatcttgctatcttccagggaagtgtacgtctaaccgaaaagatcaccgctggaaagtatcccgagtacagcgactaccaggcccgcgttggcaggtttatccctcgcttgtctgtcaaggcaaagaagaccaagaaggctagcaagaaaagcacttaatgtgttggttgatatataaccagggaattggagaatctataccagattgattgacatgtttttgctgtgattttctgcactcggcgtcttacctcaaactatcgattttgacacaatgcaaactattttcaatcaatatgttcaggcactaatcactcattgcaacaaattggaaatataagatatattttgggacttcttcaagacatgtttatgcagcacaattcttcgtgtagcgagcagcttgcatgcgacaggcctgttctgcttcgatgctcgagaatagtcctctgaaagtcttactgcagcattcattctctctttatcgaattttcccaccgcccagagaaccaagactccgactccggaccaagatgaactggcatcatagccattcgatagtctgatcctctcaagtggatgtggttcttcccacggccattgtcttttcccccgtcgccactgtctttctctccgtggttacattggaatgttcggctgcacaacgccatcttctctatgtattctttcagcgatgcgcacttgtcatacatgatatctatgatagcgtaggcccttgactgaacgcatcttcatgggaacatctctatcgtatatcctttctagaactgctatgccgtcccgtgcatggaatgcttctagagcatacccaaagggaataattgaggacataaagcgtataaagtgcaagacatacacacgtgttgggtatggcattgctaacaatggaggattagataacttaatagccaatatgtctaatgcaacgttattcggtgagttttacgataatggttcaacagtatctacacgtaaaagacatcccaatctaagacatgtttccaaataactccatattatacactcagttcaagttgtacatatccagttagacacggatatggacaggggtaacaaacgagagagaaaataaaaaaaaagacgatcttcttattgagtacaacgggaggaatgggagaaagggtttgtagtcgagggtcgacatataagaggacgtgggagaggagaagaaaccggggatgcaatggataaatacaaaaagaagagaggctacagtgatatcatgcctcccaaaattggaccaaaaccaaacggaagcacaggaatgcaaagaaacacaattcctccataatctatggaggaggaataggtgtctcgtcccggccgttgttaccggaagtttcttcggggctctggtggtccgatggggcaatggtctggccgcctgtgccatcgaagtacttggcgaactcgccagactcggggtaggggcgcgggccaagaagacgaatgaggtcatcacgtccaagaacctctttagaaagaagctcctcggcaacaataccaagctccgtccgcttctcggtcaggaggtcgcggcactgcttgtgagcctcgtcgatgatacggcgcacctccagatcaatagagcgggcagtgtcctccgagaagggcttgtgaagttgctgctgtgcgtcatcctcgtagtagatgaaaccaagcttggacgacatgccaaacttagttaccatggcagtagccatgcgggtgaccttgttgaaatcatcactagcaccactggtcacggaatcgaagtgcaactcttcgctgacacgaccacctagagtcatggccatgcggtccatcatctggttgacgttcatcagatatgtgtcgccgccagctggcaggtattgggcatatcctagtgcgccttgtccgcgaggaatgatcgaaaccttcagcagcggatcagcccacttgaagtaccaaccacagatagcgtggccagcctcgtggtaggcgacggtccgcttctcctcaggggagagcacaagagacttcttttccaatccaccaacaacccgttcgatggcttgctcgaaatgtctcatgacaaccttgtcggcattttcacgggcagctatagggagaaagtgttagctttgatagatacggagaaatcatgcataagaacttaccaacaagagctgcctcgttcacgcagttggcgatatcagcaccagcgaaaccaggagtcagagcggcaagtctgccctccatgtactccaagttctcgtcggtgacaatcttcttcaagtaaacccggaagatctgtttacgaccatccatggtaggtcggtcaatggagatgtgtcggtcaaatcgtccgggacgcatgagtgccttgtcaagaacatccggtcgattggtaccagccaagacaaccacttgctcagaggtattgaaaccatccatctcagtgagaatctggttgagagtgctttcacgttcatcgtttccaccaccaacgttcgactttgctcgagactttccaatcgcatcaatttcatcaatgaagatgatgcagggggtattcttccgggcggttgcgaagagatcgcggacacgagagggtccgacaccgacaaacatttcgacaaactcggaaccactgacactgtagaaaggcacgccggattcaccagcagtggccttagcaagcaatgtcttaccagtaccggggggacctgagagaatggcaccacgaggaatctttgcacccaacttctcgaaccgctcgggttgctggaggaagctaacgaattccatgatctcaaccttggcttcgtccataccagcaacgtcagagaacttgatcttgatatcggtctcgtggttgaagcgtttggcacggctctttccgatgccaaagattccactttggccgccggcgccgccgccagcacgtcgagacatccagaagacaccaccaaggaagaggatagtaggagccaatgacatcaagacgccgccccatggggtttcatcgtgataggcgacaggaatacgttcatgcgagggaataccgagttcacgctgagctgcgtcgatcttcatttcgaagctgtcgacggaaccaatactaaagtagacataggaggcaggctgaccatttgaatctgcttgagcggcagcttcgcggttgagatcgacccgaaccttggtgtggttcaggacggtcaatttatccacgaggcccttctcgaggtagttcgccctgaattcttgccaagtgatttctctacccgcactatcaccggggaaaaagctgcggtaggcgtagtatgtgacgagagcggtaacgaagaacgaaacgggatcaaagcggaactcgagaaccttgcccatgttcggcggcaccttgcccttcttgtcaccctgttgcttcttcttctcttcttccttctcggaatcttgcttttccttggtatccttttccttcttaggatccttgggatccttgggatcgtttggcggttgtgcgttggattgctgttcgccacccttcgccggttgctgtccttgttgatccttctctgagtccttattgaagtggacgctggattcttcgtcacgtttggccatatcactgcgcttttcagcgggggtgcgcaagtctgcgataccgcgctttgcgttttgtgcttgtctagccagacgctcatcaacatcgtaagttgagacttgccacaagaatcgcgacatcttgatacgatccattaatgtcggttcttgattcggatcgatatacgccctgacttccggtaacagtccatttttcatgatgtagtttcggatattggtccgtcggtccacatccatatcttcaagccatgcatccaccattttcaattcagcgtcggtcagaagtgacttcgggttctttgtttggtggtcattgttgcggccatctggtgtattgtcccggccgttgtcgttgggtggtgtcggaccttgcgtggcgtaggttctagcgcggcttgataaacccagatgtgagggtcttgacgggcgcacacgcatagaagccagccccgtgcgaccggttgaatccgcggctttcctcaagtagcgagcgaaattgcctggccgtcggagcagagtagccatggtcgaggaatgggagccccgagggctgcgagggcgggggtaaaaggtggtcaatcgagtttagagataatggatgttatcaacaatccatcaagattaggcgtgagagaaggaattgagctgggagttgagaagctctaaggcatccaggtccgaggtgacgccgtgtggttccttccagtcggttctaaaatttcgccgatccggctgagtcatcggaagcgcggaggaattaactagcttaaagccgtgattactctaacgccgtcgtttatgaattccgttattgaattagattgcctaaggttgatttggattggagacatgtctgtacatagtcctataagtaaggccaacccctgcgccattcgctgcgtaatagaaacccataattatcctggtcactccataagagacctcggggatggtttcgaaataagaagaggagcgcttcattatacaagaggtgtggagataatttagtgtagagagataacaccggaaacaataataccaccgccatgagctacataagagatgaaggtgacttcggtcaatcatacagtcatcatcactgcccaggcagtggcccaccgggaccagctccttcaaaagcaggaaagttggtggacatatccgcccaatcccactcaattgtcattggcatttgccagagatcttgtgggacaaatggctgctgaaatggtgccatgccggggctggcactgaatgggtgttggtcagagaatccaacattgggcatttgatcaggactcagcatgtctgagaactcctgtccaatgccaggcatgggatgaacattgcttgggaggtcagcggggagactacttgttgggggcatggcagtccccgggaatggtcctcctgtagcgggcgagggggcggcagccgtagggttggtaaacacggagggagagaaggatgtagaggtgggtggttgttgtgttcgtttggccgagggtgagtttgtcgactgttcttcggctgcgcctgtggtgtcttctgcattcttgcgtttctttcgcgaatgagactctttttcggttttatccaagaccaccttggcaattctctcgaattcaccgcaaaggcctagcatacgcttgatgctgccgtttgattcgtcggacactagggtagaaaggaagctgactaccacgctcattaatttaacatcggatcgagcacgagcatcggtgggattctggaggatgttggcgaaaagagttacgagggcagacaccgggtagtagagaatcagcctggtatcgagttagcaactgttcgttttcacaattctctgaaacgtaccaaacacaagcaaagtctccttgtgggatatacttgattagattaatcgatgctctggcagcagtgacacacaaaactgccgacaagaataccctagggttcaagggccgtgcatttaagccttgtatggcatagttggatagacggcttgtccaatacccgtgatgaaccgacatccgatgaatggtggtcaggcaattgtagtaggcaaaatgtagaacaaccatgtggatgatgaggggggtgtgggtggcttgaatgtcgtattcggggcggaagtcgataggaatgctgtctttccaatcttccagctctttgtcaagctcaccgattgtattgagcaattcaccgtctgattgtttcgatgctttggcggaataaagtcgcttgtatactctgctttcaatggtggcaaattcacacaatgaccggaataggttgaacttgcttctaccatcagatagtggcacatttccaacattgtccggcggatcttcgctcggtaactcgacattcatatcatcgtcatcctgtactggaggtcgaccagagcgtaggcaaatgctaaggaattggtcagtattggagataaaggtattcgggggtcggaaagcagctcatactctttgtcaagaagataggcgatccagaagactctcttccgctgctcaacttcaacgacattgaggccaaagccagagccgcgtttgtgtagaccaatgctgtgggaaagtcgaatcgccgcagcgactagaaagaaagcaggctgtgggttaggggttccttgaagaaagagtgactagaagagtatgtaagacaaagctacaaataccagggtaggaaactttaccatgcccaatagcgcttgcacgctcaagagatccgtgttgcgcattgtaagctcggtcaaaactcccatggcgttcttcaaataaagccaagctcttttatcctcttcgtgtggcaccaagttactcataatccgcagcctgtgagatatcgccagaacaacatttatgcttgcccaccagcccgaaccctcgtaggggtcgcgggaatattgccgctccaccaagtgcatgaatgtcgcttcgtgaaacagtgggaacatgcaattgaaattttcaaagaagtccttgaacagagaaagggcttcttcctttggcgggagaggtttgaacacacgccttgcgaaaatatcgctgaagatttcgggcttccagtacatccatttattgtcatcgacatatgctgacgaaatcatgtcttggaaggatgtatcgccggttttctcattgacccattgaataccctttggagagaatatagagaatccagaggatgatcctgaggatgttagcaagctagcccagcacagttgcgcgaaaaagcctaccaatataccgagtttccccgcagttgttcgtcaccaaagaacacatcatatccgacagtgcctcaacttcggtctccgacttttgtgactctggtgatgtagcggctgtctgggggctggagttggattccatacgaggtgtggtttggtgggagcttgaagcttgttgagctgcagctgcttgagccatgaacatgctggagcttttcgttgcgttcaacgcattcgttcgatccgctagccgtttctccaatgttccgagatctgtcttgccgccatcgtcttctgacaaaagacccgacaaacgcaacaacgactccatccgacccagtcggttttcaagaccttcgatgtatttcgctctatgtaagaaatccccaagtcagatatagaaccccatatgcaatgaagtatacaagtatacataccctttaggaggatttcgcttcttctccacttgtgtgaagatgcattccgttttgtagttaatgcagtgagaacattttggcatttttccatcgcatttgattttcttcttccgacacatatcgcacgcctgtttgctcattaggggtgttctcgatatccgtaacgggtaatgatcctcactctcgcgatcctccgtctcttcgcatcgttggtctcgtcccccgcgcctaatgacgaatcatcgtacatagatcccgcctgcatctgagacggatcgtagctgaatagctgtggtgtctggttcatcatattaggctggtcgaagcccatgccgtcgccgtcccccaggccatccattttgtgtttgaggggccacggaaactccgcggagtaaaagtaatagcggtgataagtaacgggtgatactgcggggtgctgtctctcggcgcaaagcttttttgtttcgcccctgagagaggagagggtgcgctatagattattgaagtgaatgacgcatgcaaggatgggatctttttttcgagggagtagacaatgaaatcactgggcacaattaccccaaccttggaaagttcggggctttaggtaagaaatgactcaaccacacgtgaggacaaggatctgtgtgaatcaatatgactccaactgtggcagtaagagcacaaaatgctctaccgagttacgctatacaagttgctgcctcgaagattattttgtggcatgacggaaccccgaaacccgaccgccgagcacacggtcccnnnnnnnnnnnnnnnnnnnnnnnnnnnnnnnnnnnnnnnnnnnnnnnnnnnnnnnnnnnnnnnnnnnnnnnnnnnnnnnnnnnnnnnnnnnnnnnnnnnnnnnnnnnnnnnnnnnnnnnnnnnnnnnnnnnnnnnnnnnnnnnnnnnnnnnnnnnnnnnnnnnnnnnnnnnnnnnnnnnnnnnnnnnnnccggaaccccgaaacccgaccgccgagcagacggtcgatttcgtccgatccggggcttgggcttccgttcagtctctggcaatccactctttggttgcgccgatcaaaggcctttttgctctttgtgtatcgtaattattcttgggagggtgtggcgttctatatggggtaggacggattccgtatccgggccttgtaaccggagagcagccctacaacatacgtgtttcttagcatccacctagacaatagttgaccttatggttacctaccgactccgtagttagttaactactccagagcttggttatgtatgactaaaactcaccatgagcgacaatttagaggtatgatctgatgtgatgccgcggattgccggttctatgctggatctgtcggatagatagtaataaaagtacattcaatgaagagcggcgatctcgtagggatatgtgagaatagtacatataatacaacaaggttcgtaaagagcagtcctgttcctccgatcttgtaaatgccaaaccaacgccacgctatatgcccaaaatataatgaccagtttgtcatgtcgagacctaaattcgctttcccatcgtgacccgagggtccatgctagagaagaaagaagtcaaggccgcactggcaaggtctcaaacatgtttgtcgaggaattccttcgcctcgttaattttggtggccaggtatggactaccgccgcgatcggggtggttgagcaacatgagctggcggtggttcttgcggatcttgtctttggtcaaagttcgttcactgagagatactgtcagttctggcacatcaaaggtttgtcactagcacttacgcaagttgtagaatcagagacgcttcccgacggttcatgcgcggttcgaatcctctgttatacgttagtcaatattccatatgaccacaacctggcgaaatgtccacgaaccccttatagaatgcctttccggcagcgttcaatcctcctctggagcggcggtaagcgaccagaccggcgcggccctgtagacaatgagttagtcctgtgctgctagcaaatcactttttaactcaccagaaaggcggttgtggcaatgccaaatccaacagcaaggatagaggccattttgtagatcgagatagagaggtcacgaaaacgagatcaagtcggttggaccggggaatgagcgaagaggcgccgggatagaaaagtcagcgcgggtgtccccaaaagggcttagcgtggtctgctccaccattcaggcccgaagctacagaaaaagtttcttgcgactcaacgaagacataaccaacaccactctacaaccatgcggtaagttttgccgttaatttttgtctctatccgttctacggaatgctaatatcattttcatctgcagtgttgaaacttgtcacttctgttcccgcccggctttcccgagtaagggaatcacattcgtccgcaacgatgcccgacaatttcgtttctgtcggtccaagtgccacaagaacttcaagatgaagcgtcagccccgcaagcttaagtggaccaagactcaccgtgcctcccgcggaaaggaaatgatcgtggattcgtcgcttgttctgtcccagttcgccaagaagagaaacgtccccgtcaagtacgaccgcaatctcatggctgctaccatcactgccatggagagagtcgaggagatcagagcccgccgcgagcgtgtattcacgaaacgccgcctggccggaaaaacctcccgcgagcgccagcgcgaggcggaccgcaaggtcgtcaacgagggcgagcacctcatccggaaggaactccgggagcgcgaggagggtctccccatggtggccgagcagagcaaggtttccaacagagttcacggcgaggagagagttcgccagaagcagaagagcaagcttttggtggatggtggagtggaggagcagatggatatcgactaaattttatcttgggcatctatattttcttttgttttgtgctttctcagatacgacacggttcctgcagcacgcagattttcggagttgggcatgctttggtgttttaaaagcaatcaatgtttttcatcatatctcatatccagtgggctgttagcctcttactgcttgagaggctaattaaaatgtgtttacaatgacccaagatgttacataggttgctagtttgctagtcagtacagtggccagagtggtcaaacgaccataatgagatctttggagaacgaccccaacaaatatcccatttaggcaaatgctattaacctcgtctacaccctctatcaacaaagttctcttagtcaacccacctccctctgctatagacacagagtagcctcaagctcaaccgtctatagtattttaagcaatgattcaacataaaatcaatacttggctattgtatctatatacaactaggactctggggacttaagcggatcagggtcgttctccgcaatccctgcaaattggaaaacaggcgacccatccaagacaacaagagtttgtaccctacgtacatagggagaggcgaagatcccagtatcaagataggtagagtctcggtagaccagctaagataaaacgatcagcaaataggagcacacataggtggaagacataatcagccagcttgtgatgctacaaggatctgaaatcaggtagccatggtagccatggttgcagcgatggcaggaaggattattattgtctcacaaacttccaaagatataggaatatatatctagcaggagtagctagagggagatctttggcagcaaagaaccaggcagttagctaataggttgtttgaaactctcataaaacatgatatgagaaaagaggaacatgttggttctgtctgataaggaaagaagatgaagacagtgagagagggagatgaagaaggggaaggtgaatgagggactatgtcaagtcagtccaacgtcagaactgatcgaatagccaaactctaggatatggaagaagaaccgaggtcgtcaggtatacaccatgaatgcacgcggaacagcgttggaagggttaaagataggtagtctaaagaaatagattgagggttatgtagctagaagctagatgatgtgcgggctaaatgggaggtaaatgatagaaagaagagacatcgaagaaatcgagcggtgttcttgtgccgcgcttgatatgatcagtaaaatactaaatacaatacaagaatggccggcaagaagatgctgatggggaaagcgagaggctagagagagaaaaatgtgaagcaaccagaggtaaaaagaacaaagcgcttctctggtaagcgcaaactcccctattcgatcatccttccttccatatatgtagatcaaaccaggtcctgtagtagactgcgccaaacaccacctccaagaggaggagaaatgaaactcagaagaaaaaaagcgaatgcaatggtggaggttgatgatggagaatgataatagacgggggaaagacgcgggtgggtatgaagtagacaaaagtagatgagactcatatagacagggtatagtctcatcgaaaatcatctgcatggaaataaatatgctaaactcatgtactgttggatcggagcaatgcctggaaataattagccttgctgtttgcgggtggctctgaacatacagctaacgtacccgctcgtcgatgacctcttccttctcttccgacggactgaccacactccctcgagtaatgggaccagaggttgtgatagaccgggaatctataaccgggcgaggggacggtaagggctgctgctttgaccgttgttgttgtggtggtggcggcggcggttgttggttctcattcattgagtaattggggtgcatttccccactgctcgatatcctagactctttgctcttctccaatagtgacccgccaagggtagcacatttgaggatagtttgcatcatctggttttgtttgagaggtttggacaaatattcgtccatctgggcctggatacacttctcccggtcacccaacatggcgtgggcagtgagcgcgataattggagttctttgaagtccactctcgcgttcatattcacggatcttgccagtggcttcaaagccacccatgactggcatctgaacatccatcaaaataacatcataacgacgtttcttgacagcattgacagcttccaagccattaccaacaacaaacacgttgtggttatgtttctgaagaatcttcattgcaagttgctggttcacgtcgttatcctccgctagaagaatgtcgaatgaacgtgagttgtctgtggtgattggcgtcgaccggccttccaaggctggtagcataccgttgccgagatcaatcggctgacacggggtagtcatatatgagctgatacccaggtccaaagccgacttcaagctcacgcacactaaaggacagaccaaaacaatcggaatgtacttgaactcgtcaaaggttcgcaacacccgggccgtgtctaccgagtcaacaataataacatcgtaggcatggcctgattccttgccagaaggatcttggatctcgggcgggggaacatgttcctcgttccgtacaaccaacggctccaggtcaatcttcttcaacatcttcatgacattggtagcttgagcaccgttctgacccttgtcgatgaacaacacccggtggttcttgtacggcaagagctgattggcgataacgctcaaagactggtccgcgagttttaccacacaggtgaagtggaaagtacttccatgtccatattcagaagtgacccagacgtcaccacccatcaaattcacaaggcgcttggaaatcgacaatcccaacccagtgccaccaaatctgcgggtggttgagccatcggcttgttggaaagtgtcgaaaatgagatcaagcttatcctcttcgattccaataccagtatcagctactgagaattcaaaggcgtattcgtcggtcgtgcattgctctctgtccgactttcggatagtgagcttaacctcaccatgctcggtaaacttgatagcattgccaacaagattgaggatgatctggcggagacggaatggatcgccaatgacataatcaggaacggtgttgtcaacttggtaggtcaaactcaagaacttctcgttggccttcacagccaacgtcttgagagcattgaagacagtacctctgacggtgaatggaatgctctcaatgaccatccggttggcttcgatcttagagatatccaaaatgtcatcaatgatagtcaacagactgttcgccaagttgtgaacgacattcaacatttctcgggtataaggcttgagatcatccgtatccaaggtcaactgggtcattccaatgataccgttcatcggcgttctgatctcgtgcgacatgttcgccaagaactctgatttggtgcgattggcgagttcggcagcctccctagcggcagtgtttcgctggatactgtcccgtaggttggaaaccatcttattgatctttcgcttcagttcgtccatttcaccagacgcattgaccgtgatcaacttggtaaagtcaccgtcagtggcggcatcggtaatttcaccgaaagcgcggacttgggatgtcaagttctcggccatggtattcacatcctcagtaatttctttccaagtacccgcgataccctccacgttggcttgtccacccatcttgccatcaacgccgacatctcgggcgaccttctttagctcagtggcgaatttggccagtcgacccaccatgtggttgatagtgaccttgagcgtaagaatttctccctgagcatgcacttcaatcttcttgctcaagtctcccttggcaatagcttgcgtgacatcggatatacttcgaacctgagacgtcaaattctgggccatggtgttgacattgtccgtcagatccttccatttgccttccacgttgtccaccttagcctgcccgccgagagtaccatctgtgccgacctcacgagccactttgctcacttcaaaagcaaaggtattgagacgatccaccatgccattaatcgtactcttgaggtcgaggatttctccttgtacattggcagtaacctttttggtgaggtcacccttggcgactgcggtggtaacgtccgcgatctcacgcacctgcgtggtcagattgttggccatacggttgacgttttccgtcaaatccttccacgttccttcaacatcattcacagtagcttggcctccgagaacaccatcggtaccgacttccttggcaatcttggtgacttcttgtgcgaattgccgtagttggtccaccatggaattgatgatgttcttcagttctgctatttctcccttacagttggcctggaccttctgcgtgagatcacccttggcaacagcttttgtgacagtagcaatatctcgcacttgcgtggtaaggttgttggccatggcgttaacattaaccgtgagttcgttccacattccctgcacaccttcgatttgagcttgtcctcctagtacaccttccgtaccgacatcacgcgcgactcgagtaacttctgttgcaaacgtccgaagttgatctaccatggtattgatggtttgttgcaactccagaatttcaccttgggcccggctctcaatcttctggctaagatcaccatgagcgacagcggtagtcacggcggcaatttctcgcacttgatctgtcaaattcttggccataatgttgacgttctccgtaagctctttccaaataccatggacgccagtgatctgagcttgtccaccgagtatcccttcagtaccgacttcgcgtgcgacacgggacacttcactaccgaagacttgcagttgatccatcatagtgttaattgttcgtttgaaggtggcgatttcagggtccatttccagtgggtggatttgaaccttcatagataggtcaccgttggcgacttgagtgatgattccaccgatttcacgcaaagctttctggaaggcctcgttggcctgctggtgtttgcgcaactcgcgctcgagcagaacgacatcctcattttcgaccttggtaagagcgcggcgagtgtgctcttcctgtttctgcaattcctcgcgaacctgggcaataatatccttttggctgcttatctcctcggcctgcttttgtacgtggttgcgaaggaagctaatatcctcctcccgcacgacacgcgtgccgttatcatcttcgtcatcggattcgtcgtcaatttctcccaggggtggttcgtcggccgcgggaaccgggttcgctttttgctgtgacagagagtcagaatcttgaccggacgacaagcgagagagcccaaatgtccacaagaaattcctctcgttggcctctccagcagacggggtggtctggatggggtccgtctgctgttggaaattgtggtgactgacagcttggaattccagatggtgcacgcggcgcaccagggcctcaagctctgcttcgaaggctgccttggtgggactgtattctccgggaagtttggccgatttggtaccgttgaagaactggaaatcaaatgagggcgaagaggaaccggggacagagtcgtctcttgctaaattctgcagcacggcagtcgcggccacgagtgtctcgtccacgctagccattgtggcctacataggtcagtctcgtagtacaactaacgtacaacacatcttatagtaccagcacccgagctggaaattatgggatggggttagggtatcggagagcgagcttaaggatcactcactggcaagtctggatcctaaccggatgacagagatatagtctaattaaggcgacatgaggggggaagagtccaaagagaagacaaggaataaaatagacacccgagtcaacgataaatatgaaagggaataataatatggcaggtcgggaagggggaaaataggtggataagccctggagagggttatgtaagccaccactagggatggctctgcgggaagaaagagaaaaggaacttgggaaagaccgagatatatagagaaagatccaaatataagggaaaaaaagtgaggtttcgcggatgagaagagaaaggcgggaattctaagatttggggatgagggaggggggaagagattttgaaaggggcggtgatatgtcgcctcttttgggttttcttgggctgtttttttctgtttttttctctctttcgatgtctctgatctttggggggaatctatcaatcgccttcgcgctgtaatagtgcaaatccactggcatcaagcggatcaaattgggtattcaccttgacggagtcctgcccaggtgactggatatggcgcacggactcgctctattatagtttcatcggaagagtatatgaaggtactccggatactatatccaaactactcacaaagagcttgtatgcatctgtacactcaggatccctatatcgccagagaatatgtcgtacacaaatcaaatgtgtttcatgtggaggtgattgcctctgggactagtgccgatcacaaggtggctccggttcgtggtttcctttctcaatactgcgtactctccatatccctggaggcaaagataggcgagacagagtttgccgaacaattggctgggatccagcgagatccagtcggagttaatctgagcctataggagatcaacgagaatgtctcatcgttagggtactgccacagatccatagtttggtcttttttggtggctgagccgtccggcttagcgtctcccgttggccgaggtattcataacgtcgattggtcacacgggacctcgtgaaagtgaagatgttcaatattcggtaggagtactccgtactcgtacctggatcatattgactatatgtttcatatataaaaagagggaaatgtgtctcaatgggtaggattttaggtggattttgtatggattaaatggaatccagggggaaatatatacccaacgttcccggcagtagatagtgatacatggtggtatctgttgtatgtagtaaatatgtatttatcttctcgagagcatgtcaagctgtcaactggtcaacggtcaacaatggcgggggtcaaacggcacaagtggtcaatgtaccccgccgtattatcttttggaatcccgcagagtcataattctacaaaatatcgtcggatcaaaagaacgcccttcaaaacacccgtcaaaaattgactctgcaggagtaggctgcagccatggcgtccgacttaacaaaccagatcttggacgccctgtccgcgtccgatgcgcccatcctctccagcgaagctttcccctccaccccctcattgaacgttaagagtgcgctcgatcgccttgattcccgccagatggtcgaatatgagaccttggacaaggaaatcgttactctcactgcggagggccaggagattgccactaatggcagtcacgaggccaaggtcttcgccgtggtgcttgctgctttggacggattgaagatctccgacttaccaggaattgtgggcaaggagaatgccaaagttggccaaggaaacgccttcaagcgtggctggattaagaaggataaggatttgctgcgggcatccacagattcgattgtcgacgagacgcaacagcagctgctcgaggttcaaaaaacaaagaacctggacgataagaaggccctggctgacctcaagcggagaaagttggtcggtctggcaaaggagatttctttcaagttcaccaagggtcccaagtacgcccgagaattcgtcaaggagcagaccgacctcaccccggagatgatcgccagtggctcgtggaagacggcgcatctcaagccctacaacttcaatgccaagggcgccccgactccatgtggtacgctacacccgctgaacaaggtgcgacaagagttccgcaacatcttcttcgagatgggtttcgaggagatgccgacgaaccgcttcgtcgagaccggcttctggaacttcgacgctctgtttgtgccccagcaacaccccgcccgtgatctccaggataccttctacatctccgatcctgccgtggcagatgctcctcgcgaggatccccccaacgacccccaccgtccagcccaattaaagtccgagaagccacttgactacaaaaagtactgggacaacgtccgcgaagtccacgagcatggaaagtttggctctattggctaccgctacccctggagcgcggatgagtcgcttcgcctggtgctccgcacccacaccacctccatctcgacctacatgctgcacaagctggccgccaacccccggccggctcgattcttcagtatcgaccgtgtcttccgaaatgagtccgtcgatgctacccatctggcagagttccaccaggtcgagggtgtcattgccgacttcggtctgactcttggtggcctgattggattcatggaggtcttcttcgccaagatgggcatccacaagctgcgcttcaagcccgcctacaacccctacacggagcccagtatggagatcttcggctaccacgatggtctaggcaagtgggttgagatcggtaacagtggcatgttccgtccagagatgctggagtccatgggtctacctaaggacttgagggtctacggatggggattgagtctggagagacccacgatgatcaagtacgttgcatcatctacctttcgtttacatttactaatatctcttaggtacgccgtcagcaacatccgtgaactcctcggccacaaggtcgacctggacttcattcagaccaacccggctgtccgtctcgagaaggattaaacagggagatactcatagaaaaaaagaacgtgcttttagttgtgtcttgcttgtaatcacgagtttatgtcgaaggaaacgtattacatatcaacgatggacaggttgtgaatacttggtagaaaggctctagcgtagttgatcaatgtagatacaaatgaaagaaaaagaaaacatgatattgaacatgtaatattcatcgtgcatgtgtctacattggatgtcctgcccgtatctgtgccccagcgcgtggatctctgcagcagtggctcatcaggaggcaaagctcgaaagcataatcttcggcaacaacaagtatttcttacctcctcgctcatggagatggagacaccgaagaccaagaccagcgagccagtctggttttcgagtccccaaagaatgaggaggtcttgatatgccaaaaaggaaaaagaaaaagagaagacaggtagacagagactaagaattatatgaaagggatatcatttcgattttttgacattgcttttttttgtgcttcatgaggttgggcgggagtcttataacagaaagagaacaggcggggaattcgtagagaaaaaaaacctgacccattaagtcatcgatattccattcatttcgagagataggtaggaaaacaggagtttctcagaggagaaaaagaaaaaaatgaactaaggaacataactatatcccttgcgtcccttttttggtcttgaaaccaactccccgaacacggaccatcaagccacggttcctctgcagccaattagccttgttgaacatgaaacatgcggaatgtaatgtagatgaccatcacgtaccatcaaatcaacccgtaaacaccgcccagtgaaaaaaaccccacattgctgtggatgatttagcgctggctggaggcggcccacacgttcttgaggtagccatcacgctgggtcaggcggttgaaggagtcatcgctctcgccgcgggcgcggatgaagccgcaaagagcgtaggtctggttctcgccagtgtagcggccgttctcgtcaaccttgccgacggagagctggacagaggcgtggtcgttggccttgatgatgcggttggtggcgctgcacttgcggggcacgtagctgttgagaaggaggtcaagttagtggtctgggttcttctctgggggtttgcgagcgaatatgttcccctccaataccctgtgtcctggtttttctgatggctcgccaacgatcgcaatcacgcgcgctgagtattttttttttcaatcctcgcaatctctggtcacacctagtccatctctttggcttgggattgaggcgggattgctgattgtacgcggccacgcagaaacagggtacagggtatattgggactggaggaacgggtgtaaaatccatagcacgtacagatcgacgatctctcccttgtcgttctccattttggcgggtttggtgttggggttttgacgggcgacggtgaggttggaggtggagggtttttctgccgcacattaaattgaagacctcaaatgatttgtgtgggtcatgtgaccctttatcgagggctggcgtggccgaagtggggtcgcgtgggtttaacggaagccgtactaaaggccgtggcaatttcaactcttaatgctcatagtatcgattgcgggatatctacctacggggtacatatggactgatcgtactatgggtaaatatatgtatgtatctatatatcttacaggttactcttttccctctcttttttcaacacgtcctttttccatccaacagccacctctcgtgcacttccttttttgaaccgcacaagaaccactctctcggactctcctcgcttagaagaccctttcagctcatgcccgggttcattcagacccaacacagatcgcccatcactggtcatgagaatagattttggggatatgcacttctctgtccatggaggagagccagaatgaacgaactcgacaagcgcttgacgacgcttctccatttcttccacggaagcatctgcacgaggctctctgtccaggaatcctgacaccaaatgtaaaagaaggaactgcggcgggaatagaataatttcagccttttgagcacgactaacccattccgaggcgggaagaaactgtgcctccgtaacctcgattccaccatcactcgttgggatttgatgctcctcgtgttcgccttctgctgggagttggtcgaggattttcttatccacgttgacgggtaaaggtaagaaatatagatacatctgagtagtgtatcgcttaggaatgttggttggcgtaacccagcgagtaaaagggattaattggcctgtagagtcagcgtgctgccctcgggtgtcaatgcgcagaatgggcacttacctatatcgggctcagcatcagcgctttgctgcttcaaccattcatcaaaagtggtcttgttctgatgaatgagtcgtctgccggcctctcgggtaggttcgtcgacggcaagcatcttcccggagctgcggtctttagctagaagaattccactctcttcaaagagttccctgatcgctgcacgtcggtaacttggggaatcttcatgccgtgctagatctccgggtggtgggcattccccatcttgattagacaagttgccaccaggaaagacatgtgcagatgcaaaagaggtagaggtcttcacgcgatgaagaagaaggacctcgttctttgaagatataagaagaacgctatataatagttagtacccaattcttttttgggggaatgcctgacatcgcgccgtgaatatctccctagtcaatgtgtcatgtggtcccttgcgcttacctagaactaggccgggacactgcgggttcactatcacgtttcgggctcgacatcttccgaggatttgaaggaagtgtagttgtgtattgtctcaaagcaggtttacagctcgggcgcaagggctggatcaaggcaatatgagatgcgcgagatgtttgaaaagcaaggccaacagcaaattgaagaaccaatcgctgtggtaggtgacaagaaagagatccttgacagataaaggacatcttaaatcttaaagcctatgaacggcttctcaatatagtaaaaaaagcaaagagtcgggagttcctcggtaccccgcatgaagcttgacctcatggagcttaaccgaatgcaacgccatgtgctcgggcaacctccagcacttttacaaaacctctacttgatgtttacggttggaatagattgagagaaaaataaaacgtgttggctcattaccagaaatggcgtaaaatcttcaaatcgtaaaactcctatcctgtacccttatttttaattttcaaggccccatcatccatctgggtgaccccgataatatatattcacgaagtccagtcaactcttagaagcttggatcttacgagtaaagcttcttgtcgtagctgtggagaccgtggacgttaccctcggtcatagcgctagcacttcgcatctcgaaacgcacagtgcccttgttgacaccgtcgtgcatatcggtcaggctcttgacaccaatatcctgcagggagtgctggacaccggcgatgaggtaaggaataaacttggtgacggatccgcggtcaaggacggagccagcgacaccctgggcaacaaggacgcggtccttctcggagaaatagcgagcagtaccagcgttgctggccttgctgtcctttccatcaccaccggccttcttatcctccatggcggcaatactgcccatgccacggtaggccttgacgagctggccctcgttgctgacgaagtactcaccgggagactcggtggtaccagcaagaagaccacccatcatgatggtgctagcacccatagcgagacccttgacgatgtggccgacgttctggataccaccatcggcgatacagggaacaccgaagcgagcggcaaatgttgcaacgctacgcacggaagcagcctggggacgaccaacagccataacctcctgggtgatacaggcactaccgctgcccatgccaattctcaggccatcgacaccggcggcaatcaaagcagcagcctgttcacgagtgacaacgttaccgccgataacgtcgacctcggggatagtcttcttaatgtacttgatcatctcgatctggtacatagagttaccctggctagagtccaggataacaatgtccaacccagcttccacaagaagctggaggcgcttcttgtcctcctcgcgagtaccaatagcagcggcagcgatcagctgcttagagtcggggagcttggaggcaagggggtagtggaggttcttcatcagatcagagcgggaaagcagggcgacgatgttgccgttaggatcgataataggaagctttcccttcttggaccgacgaaggacttcgttggcttcggctagggtggtgccggccggggcagtaacaagatccgtggccataacggcagtcacgggctcgtcgagaccagtgtggaactggatgtcacgcgaggtaaccattccaacgagcttggacttgagggttccgttctctatgttcaaacattagcatctgctgtcgaaagatcatgtgagggtaatatccaaaaagacaaattgctcagataaaatctggttctctacagtgcaactttcgttgctgcagtggaacgaaagttataattaaaagaggatggtcatcatgcaaagtggatgggcaggtgatgggagaagtagatgtggatatcttaccagtgacagggaagccaccgaagccccacttggccttcagctccttgacctcaccgacggtggccttgggagagatgacaacggggtccagaatgaaaccattctcgtatctcttaaccttacggaccatctctgcctgatcctcgggggagcagttgtggtggataacacccagaccaccgagcagggccatgtgaatagccatgttgtgctcggtgacagtgtccatgggtgaggacagaaggggagccttcagggagatacgcttggtaacaggggtatccaatgagacatcggaagcggggaagcctatatgggttagaaaaaaaaagaattttctatcttgactgcggggtccagcttaccgatgtaaccaggcagaatcaggaaatcattgtaggtcaatgcgccgtgcttgtcagagtcaagcagggtatcggcatcaagaccatcgagggtggtgtaggtatccaagacctcaacggccttggtgtagtcggcgatctcagccttcatggcagcaccaggtgcagcgtcgccggcggtgataggcatgatgaaaagaaggtaggtttaaattgaagactgagacacgaccgagtgagatattaatcaacagaaagaaacgttctgttgatggagaaagtcgagctttcccaaggaagagaagaagaagaaaaagttcgagcgaaaaattgtttccttttctctcccgtgcacggccaagccaagaaaaggcttggctattttgggtatagcgtactggcttttttcactgttcgcgcttctgattggcttgtaaacgagatccttcaaggcggtaagctttttatgcttatcattatacatcgatgcaggtacatacatcggtactattatgtggtgccatgtaacgtcgttgggtatgattatgatgtacagtcctcttgtcaaggttatttttccgatgagcgggacatgaatatcgattgccatacaatatataagacagcttttgaaggtggaagtgaaggtccaatgtgagttggctataattatcagggtgccattcttgatatttacatatgtatataaaaccacataacggaccaagatccttgttttattgacatggttggccttgcaacggatcagtaatcccactagttacctaccggcttcaagtcccgtacagtatgacgacagaatgatagtagcaaatgcaagctattaaaggcagcatgatttgattcaaattgtcatcaaacatcaattctcacttctgacttttgctatcgatatggcttcatctcctatgggtgaacatggcaccttcaaacctgcaccgggaccacagtctcagaacaagccggggtaagtaatgtttcacccgagcgaaatatatccactaagatgatgtgctagattggagagcaaaatgataaatcccagtgagtcgaccaaactggaaggccttcacggcttctcggaatatatgggttccgggaaattgaagggcaaaaatgctcttatcactggcggggagtatgtgcagcaagttcgggaacaaacttatttaggctaatcaatccttagttctgggattggaagatcagttgctattctgatggctagagagggcgcggatatcactatcgtttatttgccctcagaacagcttgacgcagagacaaccagaaagtctattgagcaagagaagaggagttgccttctcatcccagccgatttgagagatcgcaaattgtgccagcacgcagtggatgaacatgtgaagaagtcagccagcataaggttttgttcctggtattagcaaatgactgaccctgggagtctacagatacggcacggtcaatatacttgtcaacaatgcgtcggcacagtacctatgtacggaatttgagaacacagatctggataagactgaagacatcttcaaaaccaatatcatccagatgattgcgatgacgaagtttagtcttcctcatatggcacgaggtgattcgtgggtgctttcttctctaatctatatcatcatatactcacgcacttgctgcaggatcatcaatacttcttctatcgtgacttttcgtggctcgaaaaccatgattgattatgccgcaaccaagggagctgttatcggttttactaggtctttagcacaatccttgattccaaagggtattcgggtcaatgcagtcgcgtgaggatcatccataaattcctctttgaaatcacacactgaagcattccaaattacagtccaggtgcaatttatacaccaattcaagttgacactcgagatgcccaacagatggaaggatggggtggcggggctagcattggacgaccaggtgagcctagtgaggttgcaacaagcttcgtcttcttggccagtgcggacgcctctctatactgtgagtgatcaatatctcacaccttcaaatattcattattcttgttattgtggctaatatggggtaactatacatgtatagatgggcaagtgatgcattgttacccgcttggtgactaaatagtgtagggggtggtggaaatgttggagcactgtgctgagcatgtatttgccattggtatcaaatttgaattcaacgtgatatgaagtcagtacaggagccacggcttccctgcagtgagagccttgtcccatccctcatcattctgccagatagcgacgctctcgatctcccctctgcccagttttagtccattgtagagatgctaggctttatttcagcgaatgttaatttcagaccgacatatgcagcttactgggaaaagtccttcaccgggtcgaggggcagacactttcccgtctggggactcccagcggatatcttggaccacgcgatgatactcgatccgcaataaatagacaagtggttcctctgtgaaaaatgctttcaatgtgtttcccacctgatgcgccgttgagaggtggatgaaaccatcggcctcgtccagttcgctaaccgtgagccgctcagggattggttcgcgaactggtgcggtggaaggcacaatcttgtagatgtagcgaggttgagaaatcaacgaagccatgatgagatttatggagggaagcaagttaatgcaccgcgtctgtggtgatgatgagaagaaatcaaagttagtcaggtggtttcatttgttggcggggtcggttcaaccggcaacttgcctttcaaacgcgctgggattattgcgccattatttgtacttgtttacttatctctacttgttcaacactaaaatgaatttataacatatggaattttcaatgagtagttatcttcaatgctgagtggatagaaaaagattcaatcaagacttgcggggatatatcctgtagcatatccttggagaggttacagtactaagcatgatatttgtgaacgagaaaagccccagaaagaggcaagtctctcccaaactcaaccaaagcttgaaggaacagcaagtacaaagtacataattatgtatgttgtatattaattgacggtctatatagttaacttactgggtgacttccaaggttgaaagctgtgttcgtcgcacgggactaccacttttgccaagactgcagacatcctgataagtcagatattgggatttgaaggaatgttcggcagatcgattgattttctgtaagggacctttgcgatttcgaataattgcaaaatagaagtaagcaacagatctatgtccacctgggcacatgtgggactcgtcacaatctcttagttctgcatttcacgtgattcaagatcgacaagccacaatcacctgattgcgccatacccgatctggagatttgttgtgccccctgcgcccactttggggaatcttggtcgcacttgcacccccaccgtcaacaattccatcatcggggattcacgagtctagagcccattgacacaagtcgcgcatctattgattggattttcttcgcgtataagccatgggaggttgcccttgaacgctacccaatccagaacgtcttttccagaagaagtcttggagacctttaactcgcgcattccgcatttaccaccagagcagggatgcggtcaaaggagcgcgacatttttcaaaccatttttgcataccgtcctgagattaaatgatgtcgaatcaatttccatccctcaagcgggcccagacggaccttccctcacagtccaccagtccgttacgaaacgggtcgacagcgtccaccaactcgtctgcatattctgtcgcatcaagctcgtttattcctagccggactagcactgtctcctctaatgggtcggtatcaaacaaattgggtcactttcgagggaagagtgaggcaggcagtatgagctcagcaacgactgttacggacgcaatggaacgaggaagttggtccaatgcaggtacgacgtacgacaatattcgccgatctctacgaccactacaacaagtccctaatactccatcctcaactgcaaatactggcgggtaccgacattcacgaagccacacaattgatgaatcactcccgcggaaggactatcgaccaagtaccccagaatcgcgtcatcttaatctcaaagagaatcaggctccgcgtcaccaaacacacagtcacgaatctcagagccctccagcgcatatctctcctcgtcactggtctactgtgcccgaaacctcgcatccttcgtctccccaaaagacagtctctcatcccccacagctgactgctgcactgtccgcacccgagcttgaaaccctgcagaaatcatccaccggccatctcagaactctctcgaggtttgcaaagtccggtgaaaacgaatttagcgcagctgcagcctccgtagtaggcttgcaaggccgacgacgcctcaagcgagcggactcggtagtagggagaaatggcgcagtatctcccgaaaagccgaaggcgtcctcgtgggcggccgggaattggatggaccaacagcgacaattcatccaagcatacgagtatttgtgccatatcggagaagccaaacagtggatcgaagatgtcattcaaaagcaaatcccgccaatcgtccagctggaggaagggctgcgagacggcgtcactttggcggaggtggtacaagcaatgtatgccggcaaagcacttcgcattttccgacaccccaagttacaatatcgccattcagacaacatagccttgtttttccggttcctcgatgaggttcaattgccagagttatttcgatttgaactcatcgacttgtacgaaaagaaaaacattcccaaggtcatacactgcatccacgcgttgtcatggttgctcttcaaaaatggcatgctggacttccgaatgggtaacttggttggtcagcttgagtttgaacaccacgaactcgagaaaacccaaaaaggactggacaaggctggcgtgagcatgcccagctttgcaggtatggctgagaactttggcgcggagcctgaaccggaacccgttgaatcagaggaggatcgtattgatcgagagatacacgaaaatgaagcctcgatctgcgatttccaggctcaggttagaggagctatgatacgtttacagctcggcaacacgatgaacgatctgtgggactttgagccccttctcattgagctacagtcacgtctgcgtggagattgggcacgccaaattagtgaataccggctcagcatgctccagtttgcagtggggctgcaggctattagccgaggcttcattgtacgtcgcagtcagcaaggcgacgagcaatggcgaaaagcccaggaaacagatgttctgcacttccagagcttgattcggggatctagggctcgcgcccagactagtcacctacaaactcgcgcacgacaagaagagtttggcatcaagcagatacaggccgcgataagaggtacattgcaacgcatgaatcttggggaccaatacgaacagtctcgatatgctgaaaatgatgtgaaagcacttcaagctttgatccgcggtaccttacaacgaaaggagatcaatgctcgttcccaagagctaaaacaagctggcagttccgtcaagtcagttcaagcagctatccgtggtgccttacaacgaagagaaataaatgccttgtccgaagaggcgaagcaagttggaaagtccatcaagccgcttcaagctgctatccgtggtacgttgcaacgacggcagatgaataccctgtccaaagagacgaagcaggttggcggctcgatcgagtcgcttcaagctgccattcgtggcacgttgcaacgacaacagatgaatgccttgtcccaagaggtgaagcaagtcggcagttctatcaagtcgcttcaagctgccatccgtggtacattgcaacgaagacagatgaacgctcactcccatgaggtaaaactgacagaagcacccgtcaaatcgcttcaggctgtcattcgaggatcgatcacccgcaacaacttgtctcagatgaaggttctgctcaacaacgaaacgccccaaattgtctgcattcaatcaactctcagggctctgattgccagacaagcacaaactctgctgcttcaggcactagaggaaaccgaaaatgagtgtactgcactgcaagctatcgtgcgggccgctgtcgtgaggaaaaacacctcagctattcgcaacgagcttgcggaacatctattgccagtggtcgacctgcaagctattctcaggggacaagctctgagagaattattggatacccagaggaccgaattgctcgaagaagaaccttctatcttggaactacagtcccgatgccgtggcgtcattcacagacagtatctactcgcacagcggcatgaactgggccaggaggaacatgctattgttgaacttcaagcccttgcgcgtgctgctgtctcacgaatggaggttggtgacatattgtctcaccttgaggacaacgaggaagaagttgttcaactccaatctttaactcgggcaatgcttgcgcgggttgaagttggggagatcttgaccgatcttgaggcagaggaggacttcgtcacggacttccaagcacggatcagaggtcacattatctgcaaccgctttgaggaaagacgtcaacattacaatgaaaacatggagaaggtcatcaaggcccaaagtgttatccgagcccgcattcaagggcaggcttataaaagcctgacaagcggaaagaatccacctgttggaacggtcaagggcttcgtgcatcttctcaacgacagcgatttcgactttgacgaagagatagagttcgagcgcctgcgaaaggtggttgttcaacaagtgcgacagaacgagcttgctgaacaatacatcagtcaactcgatatcaagattgccctccttgtcaagaataagatcactctggatgaagtcgtcaagcaccaaaagcacttcggtggccacattggcaacttgctatccaacaccgaaatttcttccaaggacccctacgatctcaaggcccttaacaagacctcaaggaggaagttggaccagtatcaggtgtttttcttccttctccaaacccaatcgcagtacctggctcgcttgttccggcgattgcgtgaggtcaacacctcggacaaggaatatgagcggatccggcatttgatgatgggtctctttggatactcccagaaacggcgtgaggaatattatctcattaaactcttggcacgatccgccaaggaggacattgaaagcttcacatctcttgctgaatatttgcgctgcacctctttctggaacaagcttttcgcttcatatgccaagtcatcccgcgatcggaagttcatgcgcgacgtcttggggggtgtcgtgaaggagtctgttatcgacaacccagaccttgatttggagagtgatccaattcaaatctaccgttccgcaatcaacaacgaggagctgcaaaccggccaacgaagccgccgacacccggatcttcccagagaagaagcgattagagaccccgaaaccagagaaacgttcattcaacatttgcaagatcttcgtgacattgtcgatcaattattctcaggctttgaagacttcctataccgtatgccattcggtatcagatatcttgcacagcagatgtatcagaatctactagagagattctctgccgaggatccaggcttaattctccaggcggttggccactgggtatggaaaagctacttccagcctgctgtgctggagccagagaagtacggtgtgatcgatcggggcctcacccaagaacaaaagcgaaatcttggcgaaatctctaaggtcgttgctcagattgcatccggcagactatttggggcagataatgtttatcttcagccgctcaacaagtacatcggagagtcaatccagcgcctagggaatatctggggtcagatgatctcagtccaggatgcagagtcttatttcgacattgatgaattcaacgacctctatgctaaggccaaacccaccctgtacattaagatgtctgacatcttctcgattcaccagcttgtggcctctgagattaactatatgtgcccccaccctgatgacttcctcaaggaagttgtgcgagaacttggcaatgtcaagagtaacgagaacgaattgatgggcgtcagctctaccgagatcaatctcacattaaatcccaagttggcccagcttgaaggtaagcaattcagcaaagcccccgtttgttcatttttctaactctacatcccagaccccgaagccgatgtgaagacgctctttatggagactaagcgttgcatcctttacatcatccgagtccaaacaggttccaaccttatggatgttatgctcaagccgccgacagccgaagacgatgagcgatggcacactttggttcgggaagaactgagcacgaacaaccctcgccgaggcgcttactcggaagccaacagcttaattgacattggtaccatgagctattccgagctcaagggcattgcactcgaaaatattcttcgtcttgaacagactggcaagatcaatcgtcacaatcattatcaggatttgttgaatgcaattgccactgatatccgcaccaagcaccgtcggagaattcaacgagagcgtgaactcgagggtgctcggctgacctcccagaggctcagcggccaagccgtctacctggaccagcaactcaagacatacaacgactacattgagcaagccatgatcacgttacagaacaagaagggaaagaagcgattcctgatgccgttcaccaaacaatgggatcatcaacgagagctgcaaaaatccggcaagatattcaaatttggatcctacaaatactctgcgcgcaccctggcggaccgaggtgttctggtcgcctggaagggctacgccgagcggcagtgggatcgggtcgacttgaccatttcaagtaacgaagttggtgtgttcaccattgacgggagcagcggtgtcatgatgattcctggcgccaacgcacaggtaccgctggacgacttgctgcaggctcagttcaacaacacgcaattcatggacttttttgagggacagatgcgagtcaatgtcaaccttttcttgcatttgatcatgaagaagttctataacgagtgagaggcatggcttacggacttgatgagggatgaattgggtgcacattcttattgatattattatttgtctgttttttttcttctttcttattattgtctttgtttaagataccatgggtattttgttgatttcgatagcgatagcattcggtctatacgggcgaataacatgtacacagtatgataccattcagtatcaattgtaaaccaattcaattttccagaagacctcttaagtagaaagtagacttacgtagaataatcgtctgttgtattcgaagtatacagggcttggtcaggggttgccacgtgacgtggcgcattcaatcgggttgccagctggaaaccgggcatcttcctcccctccgactgtccacgttagtcctgagggatttttgattcttcctgtgcttggcttccaattgcctgtgctgctattatattttctctccgatcctcgtttctccatacttcccctgacgactaacagtcacccctcaccatggatttctccaacctcaaagatcaagtcagcaacttgtccttgtatgacctcaaggccggtgttcgcaaggtacagaatggtaagtctgaatcccgattggtccgagggcgttatgaacaagcccgaatcagcttgcatgtgtcttacaatttgcggaaactgatttggccgttccgtcatagctgttatgaactataccgagatggaatccaaggttcgtgtacaatcgctcacccctgcgcgaaacaacatggcctttcgcagggtgaaagcgaaaagatggtgcgatccaatgcttaccctagtcaggtccgggaagctacaaacaatgaaccctggggagcctcgaccacgttgatgcaggatatcgcgaatggaacgcatagctagtcagtccatgttatctgtcattacccgcaataatgcgcaagcgctgaccttctgttattacagccaattactcaatgagatcatgccccttatctacaagcgattcaccgacaaggctgcggaggaatggcgacaaatttacaaggtaagagaaccgtggttattcatgcgggtgtgcattgactaaaccttttttcctccgaatatagagtcttcagctcctcgaattccttgtcaagaacggttccgaacgagtcgtcgatgatgcacgatcccacatgtcgttgattcggatgctccggcagtttcactatatcgacataaacggcaaggatcagggtatcaatgtgcgcaaccggtcgtccgagctggtgaaattgctgggtgatgtggatcagattcggactgaaagaaagaaggccaagaacaaccgcaacaagttcagtggtttcgaaggtggcatgggtgccggggcgggcatgtccagctcaggttcgggccgttatggaggctttggcagcgatagtatggggtacggtggatacagtggaggtgtctacggtgacggcggcggctttggcggagaatctggcgggcaagctggcgttgacttccaggacaatggacgccggtccaaccgcttcgacgaatatgacgagtatgacgagggagatgccccagcgcgcccacgtgagtctatctcccgggcgaagccccaagcaaagaagcccgagccagctcctgcgcctgtagcagacctcttcgactttggcgacgacgagcctgttactaccacagcttccacctcgactggcaagcaacccgctggcagtgctctgaatatactagacccatccccagttgacgacgacgacttcgacgacttccagtctgcaactccggttatccagtcatcaagtcagtttgccattcctcctccagcttccactgccagcacaacttcaaacacccaattcgttgcgcctcagccaatttcggcctcacagggtgccaacatcaacggcctagttggattcacatcggccagccccgctccctcttccagcggattcgccactcccgtttcgcagatggccccgattcaacagcagaagccctccgggtaccaagctcccacacccaactacttcacctccgtcaacgtggcccaatcttctggatcctctcacggtgccacctcctccatgtcctcagtggcttcacccacagcgaataagccagcttcagcagctgccaagaagccctcgggtgatgttttcggttcattgtggtcgaccgccagcgccagcgctggcatccagaaaaccaacaccggcacaaacaagggccctaaccttgccagcatggccaaggaaaaggccagcgccggcatctggggcaccccagcaccctctagcacggcctccacgcccagccagccccagcacaagcaacagtctagctcggcctttgatgatctgcttggttgatcagctagcaaagcaactcgtcgctcttacccactgagcccatgctcgcttcttaattttgcgatatggagtcatgatttcagcattcatattcctgatttgatttgatctttgttttattctgccttccttcattgtttttgtatactctattccattcccatttcttctctcccctagttggttccctacttccctacctagctagctatacgtacttgatttcctctgcggggtggggatattctatcttagctgccgccgctcttatgagggcgctcagagtcaggctcatcgagtaaatttgtgtccggaagtcacgtgattattcagtgagatctgataaacgctcactaatcgcttcttagagtcatctatgaagcacctactttctgatggcccttaatcttcactatgctcctcttatttcttggggtgtatgatcttcttattccgctctcaaaaacagcgcaagcatgatgacgcaagactggaaggcacaggggtttctccattccctatcgcaacttcatacatcatgggcttcgtcctcggtgaaaccgcatgcattgcggtatgttccagatcacccgacagctaataatacatgaatgaaactcataaggggtgtgtaaaaggtagacaaaatagcaaagctagcggcaagtctcaccgaagatgctatggcatccgacgataatagctcagaactccacattcacaccaatccccatccctcagccaccagatcatcaaggacagcactataagcaaagaccccatcactcagatggaaaaagccggacaccccacctgattcaacgtcaacgattggggcgccgcacacaccatcagagatagccctattaacattcccaaaaaagaaatccaccgatctggtatcccattcttcaaatttgattccgcgatgaccagctggacgtttcggttgcatggtttgggtgccaatattcatcatgctaaagagccctgaactcatgccgtccacttcactccatgagccttgggagatttgggacatttctaggaggcgagtaggtggttcggcttgaaagtagcaggaattagtgaagctagatgaggcagcgggtgttagtttgacgagagcgatgtcaagcccaggtcggatatcgacgacctcgccgataagatctcctccattcacaatgggtggtatacttcctctgatgagagaaaaccatgattggtgactgtcagcatttcttcgcccgcgagattgcgaattttgataccacacgtggttgcagcgtttgtggattcggttgaagtacctgatagcccaaaaccactctcgattctacatcctggtgtaagaaccaaccgcctaaggtagtttgagtcatcttgtggtgcagcaccagcagccgataccagagatgggacaataaagggagggcgggtaaggcttctcatggtgctagaaaacggttgatctccgtggtggtagagtgctgttcggcctgccacgacccgggaagggatcgcttttcgtagttccggccatctccaaactcaagttcgaagatagtccaagccgggagaaacatagcagctctcacacgagcaagtggcgcgatggcagtaagcacagcaactgcctgacgcttagtcggattggttaattggggccaccggacagtgggacagggatcgggaacacgaggattcgaatatccagataaggggattggctccctaaacatctcaccgggacgcacgaatatgacaggcatcgttccaagggtcagtggtataggctggggtggagaggccgtctccatacaaataagccacgcggagatgtgcactgttccttccccgaacttattacggatccaggtccagccctgacctgaggggtggcggaacttgtggttttgctcgtcccaaagcgtgaacggcgccatgtcattcaagtgacgtgcaccccagccgccgggattttcccagcgtttctgttctgggtgggaatgggggagcagatcccgaagcggactaacaggcgcattatcatatatgttggtgtagggtgagctttgctgaatacactgaacatgtggggataggcggatcggagatgccatcggagttgccattacatatgctgactgctgatggtacaagctatgggatggggtaagattatgtactattccattaccggactgaacgagggacttggtcacatgaccaaaccacctgacataggcaggagcataattacttgaccatagcagagtaggttgcgaaaatttggcctctcatcccacctcacgtaaaaatattcgtcccccgcgatctcttatatacgcgcggcaatacctcgtttctgcgcattttttgtttactagtcgcgctgaaaagcaaacagtctcatatttcactgaagagtggtactactttatgtacggcggtattcggaactttaatgtccgatccatttggcccgcgattatattagaaatattatactggagctcacctatatacctatcccttattcacccaatggattttgcgaggcaaaagctgggttgtggtgatgagcccgataccttatacgataggcgtgaatgccagggtgaatgccaggtatcagttttgtatatctctaggcaggttttgtctcatagtaaattagttatatagtacattggcatttgataaagtcgtgtgtagacatatgctaaatagaatgtatcttataataagtggcaattgaatagatttgaatcggcatgatgccgatgctcattgatgctggtataacgcgtgcgctgaaggaaactaaatacaggtgagggaaaacgatgggggataataagagacatttgtgagacggaagaaagaacagataaggcgacaatatggcgaaaaacttggggtatgtagtagaagaaagattcttgatcctcctcaatcccaggttatgctcccccgaagtgtatgattagaagacatgaattgagatcgtgagaaagggatgatatacgttaataaagaggaacttgcgatgggtgatagttcatcgcagtaatgggttgaacataaggctggaaagaaagaggtgggtttatatcagactaaacagtccgaagagaaggtaaaagagaaaaatccttttgagatggagctctgaaaggtcttagagattgggtaattcgggtttggcggatgatccaccaaggaggtgctgattgagtgctcatgaaacaaccttcccacatagtcaactgcatgtttcataccagagatcttcccaccctgacaggaaagtggaggttgccaagctttgctgatcgactgtcaggatttcatggcgggttgcaaccgaaacagataagccatctctccaggtgaatcgtgcacggagcaccgccaaggcttttcatggacgaacaaagccatccagggctgatattcaattgtatcaagtcttgctcagcgtgctagagcgtttgtcggcgcccccagccgctttaccggtcggagtcccagtattcgtcgcagattgagacgcatctgcgccttccgtcgaaactgcagcgagggaactatcatcagtggttttgtttccagactgagcgctcacagcaaatgaagcctgctccacctgggtaggagtagatatttgttcagactcggtggagtctagactaacgtctgcggccccggtgacgtcggggtttggttccccattcagcgacgtcaagcctccttcgatgtctcgcaaaagacgcacaaattcctccgggacaaggccattctcccctgtcttgggatcttctgcaaccagccagccctggccatgccggtacgaaacataaatcacctggccctcggtaagaggaagttcgttttcatgctctcgtgtgaagtcaaagagtgcgacggcttttccatgcatctcttcatccgggcagccaacggcaaactgataatctctagagtaccgattatcaccggggttttcatcttcggactcaaacccagggtcatgttcatagccctgctggccggccggggcgctatatcccatggttgaatagcggccttcatttgccggatatgtcacatactcaccacctggtccatcatctgacgtatctccatcatttacataataagtctcactgccatcggggttaatgccaacgagcattccgcgatcactgttcaccgcctggccagttccagacatgactctctcatctacaagaccatttatgtcagaagtcttcttgcgatgacgcgacgtcacaactgggctatgcaggtcttcatcctcgctgtatggtggtccatccccaaaggacatggctggcaactgttggtggacataggtaatctgaggttctatgcccgattggcctgttgaccatccgcgcgatatatcccaagaaggtgatggatcggagaggcgtcggtgttcacttgccggtgtggagaccccggaggcgcgaggaggaggaggcccgtaatgcaggggatgggtcgacgggtaggcgaagtctcgcacaagagcatatggaagacttgtatggaaaatggggaagacatgggagcctgggcgcgaacgattttgtgatgcaaatgagacattggaatacgtggagagccgatccttcggatgcgtcgatgaccgtttcaccgtcccatcggtgaggatgggtggcaggactgagaggttgtttgtggaaataatgttctgcgatgatgtgggagaagacatcatggttgacatggagaaagacccaggattgagttcgggatgatgaataacggggcggatcttagagaaggaaatgtggggttgttcatcggtcgcgtagttggcgctctagtttcgcattgcgattgatatggtccaggttattgaatttgcagtcgcagtcgcagacagctggttttcctttggttcaaacaagggaggtatatcttgtgatcggagatagaggagatattcggctcgaggacgatgtagtaagcgcccaagtcgtaaggggtcaaacccgattttaggttcgcgtaattcaaaccaggggcaacccttggatgtcaagcttttgaagcaaaaaaaaaggatattatccccaaggggctccggtgtggtggacggtgaatgggtgggtaatcggcaaacgacacgagggaggggggcaaatgtggtccgagtggaacgccgaaccgcgacggggaagatctcacgatgagaagacgatatcaacaagagaaagccggcgattttgcaagatttgcgtagtagaatatccgttcaagggctcaaggtgggattggcaaaatcgagactgttgttccagcggtttgtcccgcaatcttgagggtagggaattgctaaatatagtagcagaaaactgcagaaaggaccaatgtcagatacgaatgtaacggaggcacagcgcttatgcaggaaagaatgtgcaaaccacacggtaacaagtgttttggtcaaggccacatgggaaatgggaaatgggaaattagagggagaaatagactcgcgagtgaacgctcggagattgccatacctgtctaagttgtaggttgaactggagtaatgatcagcgcgtagttgattttgggatcgggggactgttggttgttgggacaatatgatttatccgatggactgcagcaaaggaagcagcgtgaatcagccaatatgcaaggcagccgcttgagagtcacagagttgggcgtgtgtgaatgggtgaagcttgaacccgtcgagcagtcacgtgccgcccagccttagcgcgtttcaagtctggtttcgtctattcccgtttgggactaaaggctatatataagattgttctacttcgatgcctccatgttctgttatgaatgcagggtatctgagacatagattcggtttacaacgggataattagtttacaaacaaagggattgtcatttcattcggatattcagtcgctttgttctatcttggatgtttggtctttcaacttcattttatgtgggttgactcccagccataaatacagtgcttgtgctgatctcccaatctgtcactgtgactgttttaggctgaacccctgtcgcatccaaagatgtgccaaaggtggtcggctgagaggatagctgagaggacggaacgccgagtgcatcgaactgcgaaggaatcgcagcattgttgagatcttggtcagtctcatagtcactcttgactgcctgcttgctgattgtggtcaccagatccacgtccatacaagttgtgtagatctcggcctttccattgggatacgtgggatcaacacctgcagcggtgggccaattccacacccaatagagtgtgtatggtttcccactgggagcattggagggcagtcgaatatcctgctgacaccagaggtctgctcccatcagtgggtctgctgtatgagtatacgtcgcttgtcgagtctctgagatttgccccgaattgacctggtagcaacggccatcgtcgtagttctgcaccgacagaagcactccccgtccatcacctcctgttccatctttggtccaggctccataaacatcaaggaacttctcgcctgtcttgggctgtgtggtgccatatacataaacggatccccggctcgcaggctttccgggctggttctgaggaagtgtcacatggccgttttcttggtagcgaagggcaattgccgcgccagcgctggcttcaagccgagggcttccctctgactgagtctgatcctgctgagtgtccttgcacatcttgtcggttggcagaatctgagttacatttgcccttgtgttgggtgggatcaagtaggtcattgcagtgtcgctaaagcccgatgtcgtgcgcaggtagtttcctcggggatatcctggagtaccgacgaaggttccattcggagcaatgagagtgagctcttccacccaagaatgagcgtgtgttggggtatacagagcaaagagcactatcaaaacaatgatcaacatcgtgatagtagttttggatatgtaggattcgaggttaaagtttgtaagaatgaagttttgtggacttgaaggggacgagataacggcgaccggcggcgtcaaatcgagtaggtattgcagtatctctttctttgggtataaagatttggaagaagctgggagtgtgcaagcgggaagtgccgtatttattgagtctagaagaacgatgaagcggccaggtcgaaggctacaacaatgggctttgtcgagatgaataggatcattggaatgatagacctgtgactatgagtgtgaatagacaatggctctattcttaattttacaccaaacacccccaggccgcagcgaaaataaggataagaatagtataaaaaggtttcaagggaagctgttacacataaagaaacccttgtccgacttcgagtctttgagtctaattggagaggctctataccctgtgccaacccgtcattgttacaatcaaggctgttaatagacaatacaaacccaatgcccccagggcctctagacaaagcaggggatgattgggtgagagagaagatatttagagtcgcagaatatttcgagacatgttcggttccgctcctggcgcgtagccgtgatatatgcaagactctaggtgctcgatcttccaagcttgcaagtgtgttacaggtctgcaggtccgttggcccagcaagcacggccattggctgattcgggccaccctgggcgcttcgccgtcagagtcgaaattaacgaagaccctctttagcgctttggctctttctggatattattctgtttgctttttgccatttcatatgaccacttgctatgatacctctggctctgaacgacttgtagatttatcaaagtatcacaaaatatatcagacattcaccaacatctcattaattaaaagggggcacggtgtgccaacagtatcttacttttttggagcctatctttttgagaagtctcagcttgttgaaaaaaggctgctatgtcgatgattttgcggagcgaagcgaagcaattaaaaaaaataaccctctccccttcccagggggggtcgaatggcccccggagggaacgcctcgaaaggagatcatgtgaccaggcgctctctctactgggtcgaaaaaaatagaaatccagtcggtgaaaaagtaatcgctgagaaacggcagaatagatccagccggcagaaaaaaaaaaagcaatcatctagtactctgtactctaaccctatccccttaacataagatcctaagatccttaagcagctcaaagatattaaatcaaaggagcatattattagagggggcgactcactctcctatttctgtctagttattaggtggtcaattactacgtccacgggtagccactcatataaaaggtacatataccccatattatgtactcaaccctttggctagttaaaggagaaataagagtatgaatcaagaataaatttatagttgaattgattggctaataaaaaaaatctcggatatcttatatatagaagtgacaaaatctctattatgtatattttatatttatgtaccttttgtgtgggtataccatataaaagatacctaaaatcccaaaacttccgttatgtggcaatcttctgttatgtgggacagacccatacctggaacaggtatgggggcggtaagacggctattcttatagtcagatcgggaaggcactacatacggggtattgtttgctatatattgctatataaatagatcctccccccaccgctgtctctctccccatccacttcaccattacctttggaatgctacccagtctttctccctgatcgaggccatccttgtgtagccatctctggaaaatgtctctggaaaatggcaaatccaatctcattctcagaactcctatgagaaatgcctcctccaatcaatgacgggtcctcacacatggcaaacagtgccatccctaggattgaatatgttggttcccttcgcccctagccaccttggtcaactacgaatactactgacatcatataggcgctttcatatatcccaagatcgatatcagctcttcatgactgttgccaagtatgacgagaaccatctcaagcacccgagcgataaggagcataacatgcaacccatcataactgtctcttcagggttgcagcccacctcaatgacattcgagcacatgatagctgttgatgagcagcccaagaatgtgttggtgaggttttgagtgccgtgttcaacacgaaacagttggatttaggtttcgcagattctaaatgcagagttaggctgccggagctaccattatctggaatcatgatacatccaagcttatcgggtagtcgaccagagctatccggaggatcataaaaaataagaggaacttcctatcgaggtggtgagagcaaaacggtcttaccgttcttgccggatcattttcctccccattatgggtcttcagtggtccctacaaatcctgcaaacccttgaccaactcacttagtaaaagcgataaattacaacatgatatttcaacaacggttgtctatatgagcttttccttctagtctaatgctttttatctgatatctagctacttactggagtttaaagggatttaataaattagtgactgagatatatatatttctagggttcagcgacgtatttttcgataccataataatgcaagttctcgatttattcaaaactgatatatgatactacaaatgcttatcaattgctatcggcgagtaataaaattaaaaaagagcgttggttgttgaaatatcatgttgtaatttgtcgcttttactatgtgttctgggctgcgcagctcgcccgggtgcgcagctcgaccgggaattacgttaggcctagtattcccttgcctgaacgactctattattttgctgttcgctcagcaaaataacctaggctaccccctacagtaggtcacattaggacagactttggttcgtcaacgctcagcaaactataacccgtatgcgtcaccaccccgagtggtcgcttataggtagctggtaatgtctgtttcatttgttcttgtccccctttatcatgaccaccccttatggcagttggttgttcccaaatctatgagcacatgattgtcgcaggctgaccctgacattgtaatctactaatacgattgcgaacacgctgatcaaaatacaggacaatcccaactacaggcttacataatgaatggggagtgcccagatgccccccaggcccaggtttcaggaggtgccacccggcgacccctggcttagggcccagtccatggggttcacttggtgatcaaaaaagcagcaaaaggggagtaccaacaagcatcagagagcaccaataccataggaaagccacttgaggccacccaaggcacccaaggcacctcagaaagtgagaagttctgcacattcccaagaccggagtaactcggcatttaccaagtcaacgatctaatctttttctctttttcacttggcaagctcggttaccgagtttattatggatatatggagtctgcaccgggtcaatccgagaagatgatttgactccgagttatcagatttttatcagatttttatcagatttctccgtagctccaccgggtggattccatctcactggtatgagagaaattgggtggactctttttctgacatggactcgcagattggatgcccagtcctccgtatatccctcgacttccctcttcagactaagggaaatgtggctgacgtggacggaacaaaacctcatttgaataatacagggctaataaccctgaacaaaacgagtggagcctttgttgcttctctcccacattctgttttgtatcacgtaaagatgtcaagatttgagcaatatagattgaatgtcttcctaaagattcctaattcaattcactatgtatagtgtgcaacatggtatgctgtgtcccatgtcccatgactatagttaaaggatcggcgtaaatataaacaaatgcctgtgcattcaatagctccaattccttgggttgtactttgtactttgtctgttgtaggcactcggtacctacctacttgggcttttgttcggtgggaattttctctaaagggtctactgcatcacccgcggacttgaattgccatttacaaatactatgttattcctccatatcaccctcttcaagccattccgctatatgtagttctttatgaaatattgcagcctggatcgtaatcgtggaatttcccctccatgtcagcttgactcgaggatccggcatattattgttctgcccattcttccaaggttcctaacgcttctattatttattatttattctttgttctcgttataaaataccaagattctccaataataaatcgcctcgctggaaacccgaccaattctccactagctgaagtcttggcgaccccgttgtcggcgatacttaattccagcggtctcgggcacctattatttcagcttcagggggcccttgcttttttttccctttacgacctccgattccaagggctgtgccttgagctttctttacttctcccctcggtacgtattatttttttggtttggaccttggtttctgcaactaagagaagaaaaaaacagtagcccggaatcctgtccagtcaacatcgacttgtgcagcccatatgcgctcctagaattagatcttaattcaaagattttctcctcaggattggttttggtgtaaaacatcatcccacgacggctttcctcgcaggttctggtccttgcggaccgtcttaaacacaacgccttcaacagacgtcctcaccgcttcctccgcgactagtcaacatggctacctcgttcatcaccaaacgccttcgctcaaacgaggaagagcagaatactcaacccagctggatccggcgtcaagttgtgtcaggcctccagtttatttctcaccgggcctgtgtgcaccctattcacactcttgtggtgatcgccatccttgccagcactacctatgtgggtctgctcgaaggcagcctgcttgataccccgaaagactcgttaagtgtcgcgggacaggtcgacaccgatgcccttctccagggaagtcgaaatctgcgactcggagaatcaacttcctggaagtggcaggcggaagatgcgtggactgacccccaggtgagcccatttcaccccaccgttcttcttgggcgtcgagaatgatatactgactcaatgaaatgttagaataagaagcctgctgcccagcacctggctctgacgaccctcatcttccctgattccaccaactctgattcaactgccccggcagctgatgatgtcccgattcctgccgatatctccgccaactcggtaccgtacaccccgaacctcttctcgcattttactcatgacgcttccctggtttacaccgtgccctttgaacaagtctccgaacttttgagagctgtgcaggagatccctgccccacccacggatgggaatgaggtggaatccaagaaatggatcatgagagctgctcgtggcccggtccacggatcccgcagagctgtaaagctctggatcgcggattcatggaattcctttgtggatctgatcaagcacgcggaaaccattgacattgttatcatggctcttggctacctctcgatgcacctgagtttcgtctcactcttcttctccatgcgacgattgggctccaacttttggcttggggctaccgtgctcctctctggcacctttgcattcctttttggactacacgtgaccactaggctgggcgtgcctatcaacctcctcttgctgtctgaaggtcttccattcttggttgtcaccattggatttgagaagccgattatgttcactcgggccgtcctgaaagcttccgtggacaatcgccgacctcttcccggcgctgcccctcgcccgctggcatcgagcacaccgaggtccatccaggactctatcgcagctgcgattaaggaccaaggttacgagatcgttcagcactactgcattgagattggtctattggctttgggtgcggcatctggcgtccagggtggactccagcagttctgcttcctcgcagctttgatcttgttctttgactgcgtgcttctcttcaccttctataccaccattctctgcatcaagctcgagatcactcggataaagcgtcacgtggcacttcgcaaggccttagaagaagatggcattacccacaccgttgccgagaatgtcgcttctagcaacgactggcctaacgccagatctggcgaggcggacaccagcatctttggccgcaagatcaagtcgagcaatgtgcgccggttcaagattatcatggttggtggtttgattttgatcaatgtcgtgaacatgtcagccattcctttccggaacaccggcaacggtggcctgctctcgcgtttctccaacgtcctgtctcctacccccatcgatcctttcaaagtggcagagaatggcctggatagtgtgtacgtggctgccaagagccagaagcaggagactattgttaccatcctttcgccgatcaagtacaagttggagtacccctcagttcactacgcagctcttaccgactctggttcgtttgacatcgagtacactgatcagttcttggatgccgtgggtggcaaggttctcgaaagtctgctcaagagcgtcgaagaccctgtcatcagcaaatggatcatcgccgctttgactctcagcatcatccttaacggatatcttttcaatgctgcccgttggagtatcaaggaccctgagacccttcccgagcctgtgatcgcaccgaaggtctaccccaagtttgaaccaaatgaacaacagtcaagaaggagcgtcgaagaatgcgagtctctgctcagggcaaagcgtgcgcccttgcttaccgatgaggagctgatcgatctttccctccgcggcaagcttccaggttacgcgctggaaaagtctatggaggatgagaacttgatgagtcgtgttgatgcctttactcgtgctgtgaagatccgcagatctgtggtctcccggactcctactacctctgctatcacttccgttttggaaaactccaagctcccctacctgaattacaactatggccttgtccacggtgcttgctgtgaaaacgttatcggatacttgccccttcctgttggtgtcgctggtcctctcaatatcgatggacaaaattactttatccccatggctactaccgaaggtgtcttggtggctagtacaagtcgtggctccaaggcaatcaacgccggtggtggtgcagtgactgtgctgaccggtgatggtatgactcgtggtccttgtgtaactttcccaaccttggcccgggctgccgctgctaaggtttggatcgattccgaggaaggccggagtatcatgacaacagctttcaactcgaccagtcgctttgcccgtctgcagagcatcaagactgcccttgccggaacctacctgtatatccgcttcaagactaccactggtgatgccatgggtatgaacatgatctctaaaggctgcgagaaggcactggacgttatgcataaggagtgtggtttcgatgacatgtccatcatttcgctttctggtaacttctgcacagataagaagtctgctgctatcaactggactgatggccgtggtaagtccgtcgtggcagaggctatcattcctggccatattgtcaagagtgtccttaagagcgacgtcgacgcactggttgagctgaacgtcagcaagaatttgatcggaagtgcgatggcgggcagcttgggtggcttcaacgctcatgcttctaacatcgtgtctgccattttcctggccactggtcaggatccggcccagaacgttgagagcagcagctgtatcacaaccatgaagaagtaagctttatcatccgccactttttgaccattgagatgctaataatgatttcctcaacagcaacaatggcaacctccagatcgctgtgtctatgccttccattgaggtaggcaccattggcggtggcactatccttgaagcgcaaggtgctatgctggatctcctgggtgtccgcggtgctcactcgacttaccccggcgaaaacgcacgccagttgtctcgtatcattgctgcctccgttctcgccggtgagctcagtctctgctctgcgctcgccgccggtcatctcgtcaaggcacacatggcccacaaccgtagcgcagctcccacacggtcctcaacccccgtgtcttctgccgttagcgccacccgtggcctttccatgacctccaaataaacgatgacatgactcactcctcctggcccgcagctgtaggccaatgtaaatgtgtggctacgacccatgattcttccgataccattcactttcaagactctttggcgtacctaccgctcgccttgtctttgcctctgcattataatgggagaccatctcaactgacagtaaaaaaaaaaaaaaattcaattactgacgctatccggtctccggacaggccggtattgaagaatcattcgatgccaggggatcagcaagatccaaatgaggcatactgaaggcatctcccttgggagcactataaccaatgcttcaaagcattcatgcgtgtattgaagctgttccacattgtgtacttagttgtttcggcatttttttttacattttacacttcccattcccatagatatgaccgaaagaatttatttgttttccaggcctagttctcaaataatacaaggtgggacccgtggactgtcggttacaacatacaacatacaaaattatacggtgtacaaaattatggggcaaggcaagggcctagaatcgtcaactcctgaattcttctcatttggatggttctattattaaatttgatatacggagtagaaggtaagtccatgtagatatgtcaaggtcaatgtctggatatgattttattgaacatgtttaaagttagctacattacttatagatatgtaattcctcgatacattctagtacatagatgtgtacgaagtagtaactatgtagtatgctgtgcccctggggagttcccctggcccgtggccttggcagggagaggtatagaatacaagtatcatatacgagtatagccacttttcgacttgactagtgatcttattattgatcaagctttaggaaaacgatgttcctggggttatgcagtcagccaagtaaaaggaatacataaaaaaaaggaaagaaaaataatgcgcatcagatctgagatcataccctcacgcataaatccctgtagatgcatacatatagtagcgctaatactgtacggccccggggagtaaggaactcgaagtaacagactggtattgccgtaagggaactgcggagagttcagttactaaaaccactttcgcactttcggtttgtcccttttccaccatatcagtccagtccttcactctttcggatctggtgctttcgctgttcgtattcttcgactatttacgactccctcgtggcgaatcacgactcctcacctacctccggttacattgtctcagattgggatcttagtggagaaatacaggggatttcgttttttttaccgtgacgaagtgaatgcctttatcgattatctgtgacagctggccccgtcggacagcgagtgtgaatattcaatagtgagaaatcagaacacccccagtttgagcctgatatgcatgggggttcgggagccatgtcgcctgtctctgttgatggtagcgaatggtcgggactaaatcagtatggaaagtcggacgggccattctcaccatcatcgcgagccaacctagccacacctccgacctccggcgtcccgagcgtaccgctaagtcccagtgggccacctccttcgatatcaccctccatccgaagcggtaacccatccccgcccagctcagtcgccgcaagatccagttccgggacactaggagacggcccgcgcgatggaagacgctatcgtcagatggaggagatcctgggccagcactacgtggtcctgaaaagattcctgaatggcacagcccgcgacgaccgtggcaagtcgaataaagcccgagataaactgctgcggctatcgccaacccagttccatgaactttccaccgatgtttacgacgaattgatccggcgacagcaggcctcgccgcctcctggacggccacctcgtacggacgtgcctccttatctccccgctcgaagcgacttccacgaaaagcgcaaccatgcccgccaaaagcttgctgcgctccaccacgtgcgcttccgagatttggcgaccgatgtcttctgtgagctggagcgccgcttcccgcatttcaccagccgagattaccgcgcccgaccgcctcccaatatgggccctggtagcgctcgcacctcgcaacagtctgctcggggtcctcccccgcatatgggccgcgggtacccgtctggtggtcccccaggcagtccgtttcctccgcgtgctggctctcttgggggcccaccgagtataaatggcgatggaccgtttcctcggtctttccagagcaatactatggtcccgaataagagcacgatggtcgaggatagcgatgatatggggccagatgatgaggatgatgctcggagtgatgcgttcgctctagatgctctgagccgacggggtactacaacgaccttgggtgagagtgagcggagattgttattagaaagccagacacaagtatcggttctccaagataagatcgaaaagttggaagaattagtccgcgccaaggatgaagagttggcccagtcatcacaagatgcagattcttccgggatcagtcataacgaacgccaggagtgggacgagttacgacatgatcttgagagtaaggtatcaaaagccgaggatctcaacagctcgcttcagctagagcttgagcgggttagaaccgagcacgagactgtggaacgagatcttcgcagtcagcttaatgactcttcccggggtgtcgatgatgcgggtctacaagcgcgctatgttgatctagagactcagcaccagaacttgcaggcagagttgcagcagcagaaacaggtgaccgacgaggtccgccgcgaggcagcggctttcctgacggaaatgaagactctttcagccgagagtcagtctaattgggagcgcgaagaacagctctcgcatgaggtgcacagactcgaggcagatgccaacgaatggaagcatcgttatgccaaggtcaaggcgcagctgcggcatcttcgcacgtcctctggtggtttcgccgactcgcggcccgacgcaagtcttgtcgccaaagagcatgagttggtgcaagccgacgggttggtcaaagatatccatgttactaagttccaggtatctgtggacgagctcctgcgagttgcgcgtttcgaggaatcgcatgtggtgctccaacacattaagatggtcattgtaacagttcgccatattctgcaggacgtggagtattcctcgatcccggtggatgggtcggctgctctgcgcgcaaaggtcaagggccaggtgtctacgacagcaaacaacatgatcaccgctacccgcaacttcgctagctctggtggtttatccccggtgtcgctccttgatgcagcggcctcacatctttgcaccgctattgttgacctgatacgggtggtgaagatccaggcatcgcctatagatgagctggaagatgaagattatgaggtggatgtacctcaagaccaattccccgactattttggtacatctggcagtcaaaagcggatgagcaataactccgtctacagtgctattagtcgtccagatgactctcagtaccctgcgcagaatggcgcgactaatgacctcaatcatggctgggggcatgtgcaagaagatcatgaggtgttggaacttaaggtgggtcgaccggagaaagataataccgctcaacgaatgatttactgacggatgatcctagctctatgtcgaggaccagaccgatggcatggtccaacaaatccaggctttggtggccagtatccgagccgaggacaacctgcaaactgttcagacgcacgtatctgccatttcgaacgttgttgcgaatgtggtatccgctacagagcagttgatgcgcgaacgcagcggagacatcactttgcggcagacatctgaaccagtcatcgcggcattggaccagtgtcgcggccggttggcggccactgccggtgagggccaagacgccaccaccccggagcaattgcatgagctcacgaacaaactgcctcccattgcatttgagatcgctcggcagatcaaagacctcgttcagcggcttgaggctacatcggtggctactggcgaggaagatgacttccggtaaatgagcttaaccgaagtattgtttttcatcaggtgaactcggagctactcattttgtctttctttcccctcaaattcttctttatattccttcctctttgccccttgcttttcagcgactatttatctatggcaacgagcggacaatgtcgaaacgatgtcccgacatgtgtggcatttatgggctttcctgcccctttgtcatttctcctatattttcctattctttgtactttattttagcccttttgtattgatcatctaggtttttcggcctgatttcatgttgattcgtgcctctttattttatctcacgaccgcttgctggtgtcgggctatcatttctttgcatttggatgcatacaaaatgaaagtaccctgtacatcttcaacataatgactataccaataaatcaatgcaagtttccccctcgaaagatgcatgtcttcttgtagccaagattgctagttcggaagggatatcccggaagacattacataatctcggagctctagacgccttttggcgttgagcttcgtttttttccttctttctacttctttaattcgcattcctcatcatctatatcctttgtaagtgcgattggtcccttttcatctgaaggatagagaaaatatccactttgcttcagactctttcggagacatcattaggcaacagaggcagtgatgttttcccccttggaagtctggagaagctccaaagtggagcctcaggcagaaactgcacaagtggtctttaagtcaaccccagcaagctaaccccaaagtagcccggcacccgagttcacccgctccgccctgcccctcaccatgttctgccgactgaggtcaataaccccaccttcttccctcttctcttcttccctcttcaattgcacttctttccaccccgctgcccgatctttcgcttcatcaaccgccgctatgtccacccccaacactaccgctttcttcgaggtccagtacgcccctgctggctcctctacccgtaagttttcctgttattctcgtttccggcggggcagggagtttttgcctccgcgctccagcctcaccttgctgtctccaaccttcagctttcaatgctagcatcaaagcttggaggtttcacatcatgtctcagtaattggaattgaaattgatgctaactcctcattagccaagattggccgcatcaacttcaagctctaccccgacgaggtccctaagactgccaagaacttcgctgagctttgcaacgccaagcagggtgagggctacaagggctcttccttccaccgtgtcatcccccagttcatgctccagggtggtgacttcacccgtggcaacgtaagttttctaatcctgacaaccgcctaatgctcggtatctgattttgattttaccggaatagggtaccggtggccgctccatctacggcgagaagttccccgatgagaacttcgtccacaagcacacccgccctggtcttctgtccatggccaacgctggccccaacacgtaagtctcagtcttgtatcccggctggtctacatccagagaaccatactgaccgtttccctcttttctagaaacggctcccagttcttcatcaccactgttgccacctcgtggctcgatggcaagcacgtcgtcttcggcgaggtcgctgataatgagtccctgaaggttgtcaaggagatcgaggccctcggctcctcctccggctccatccgctccgctgtcaagcccaccatcgtcaactgcggtggcaactaaaaagctcattctggagatttagttgggtgttgggaggatgaacgtctttcttttcgtcatggacttgcttctttcccaacgctctagtgcggcgtgggactagcataggtggctttcccttttgcgccttgtaatctaaagtttctaccaagctagctcatacattcctatctgtcgtggggacttaatgttcaatttgaggattagtagttttgtaagagcgacttttctagatattacctttgagccaagctcctaaaacctgcatgtcaacctaaacatatttcgagtcaatccacggcaaagcacgaaatcatccaggtgctcctattgccattccttcccaggtcttctcccagcaaagaaccccacgtatggtgtggtggttcgatcactcggcggggtctgcggctaactacatcaccttaccccgcgtgcggcaggttttttttttttagcggaaaacgtttccaccgcctccaatagataacctagtaccttggtagtcagatgatattagtaatgggtgatgcatactctactgtaagtctgtttcatttattgtgagagggcaattgagtagagagtaatcgagatagaagagatggttcatacgtcatggcattacaggtgagaacaaaagacaagaacagaaacaaggaggaataattgtggacacaagcaagtgcatattaccctctgccatttcgagacagagaaaacaaataccggggatatcagacgcatccagagatgctggtgtagaatcaaatcgtaattggaacgcaagtcaagacaacacaccatgcccaggcatttaaccacagcacttagtgacagacgtagcatctgacctgaagaagaaagaagccatgttagccctggtgaaagtatagtagttgaacgaaacaacttactccttattcaagtccaccggctcccaggagaagatgaacgcgcccaggaaggcaccaatgaagatacagatgatgatatacccattgaagtacatagcgagcagcatgatgatgtacgcaacagcaaactgcgtcatatgcagcagcgagcgcagagaatgctcaacaagcgacggacgatacggggcaagcaaagcatcctgtctctggccgccgacatcccgaatgcaattagccggcgcagcagcagagacagaagccttatttttcgacactccgttctggggagcacccgacacaggagtgatgatgtcgtcgtctgcggaggacctagcgtcgatctctgcgttgccgccgcagcagttgccgggcggcttggtggtgtctgtgtcttcttcgctgcgcagggggacgttggagatggattgcgcggtagaagagtccgacatgtagagtcttcgaaggcgggctcgacgcactatgaaggagtcgtattctcggcctagacggcggaggaactcaaggctcaatacgaggcagatcactccaatacaggagccggcgaacatgccgcgcgtcctgatgtgccatgttttggcgaggaagcctaggttggtttagttggctttatagccttgtgcagagggattatagctggggctgcgtacatgagtcgattgtataccagttccaaagcatctgatcatgactgtgagtaagcttgaatccatacaaggtagtgaatgtgcgattgatattagacggaccgatattttgcaactatgtcccacgtccgctttggtggcactggccatcgctgccgaggctgtggcagtggccgttgacatggtcatcccgcccatatccatgattgattgttgattggggaccttaggagcactggatcgagatagtatcgtgttgattgaaactgaagggaagcagtacaaaataaatgcaggagtagaatagaagagagaataggagatagatagaagaggggagcacttcaccgtcactctgccctaatgggagcaatatgagcaggtttatagatttggccctaaaaacttagcggcgaggtggtttgagcaaattctcggatttgggctgtaactggtaacattaaacgtaagacagagggtatcaacttgaactattctcccgtttgaatctcctttttgattttgtttgttttttgatttttcttttttttttgcgtcacccccgagatcctttgatgacaccttccaacaactcgcggatctgactgcacccatcgatcccgaccgccaacattgtctcaaggtacgtagcatgcaccttagactccatagtaagcacacacaccttcattgcctcttcatcgtcatccatattgttctcgccaacgggcaccgctgtcgtcgtcgcaacagtgagcgaaggcagttcctgttcttctggaagagataggtccagcagtgggtcaagctcgtcgtgtcgcgggtcacgcggtgtagaggcgctaccactcattcctgcagtacagccacagagtagtcctggcatagggattccggcgtccacgagcgctagggtacaggcattgatcgccgcggcgagcagtgatccatcggcagatagaacggagatatgaatgctgattgtgctgtggggatagaggtaggtgtggaggtgagactggaaggttgagcggatgattgtaccgattcgcgttgattgtctgtagtccccaggagattagcattggttgtatctagtctggtgctactgtgactatttccctatagcaggaaggtgcaatggggaagcgtaagagggtgcatacctatcacttccaccggctctccgcttgcgatctacgccggcaaacccagcgacgttgacatccacctccacaactgcatggccacttcctgcagcaccactatctcctcggcgaccctcggcagggccgtggacagagcacatgattgatgtgttgcccatggacaagtatgaggagcccgagctggcggggttggttgagatctgagcttggagcaggcggagttcattccagcgacggccatcaagacgaagccgcgtcagagggtatgtcgtcgaggtgtctagcggcatctttgcggctttctgataagaacgagagttgtcttgagcgaaaagagggtacgtcaagcgggaagtcaagctttattttgtgttttctgtgggcttaggtcagtagggcgttcctttatcgagcaatgacagacgtagaatattgtcttcgacttacgttgactttgtcgcatatgcaaagaatcgaatgccaaaccaatgagagcatctttttctctggttctcttgcacgtgaccatgtcgaccaactctataaatccagaaagaaccatttcaaccacttctttgagcatttaggagatatcaacagagacccaattctttttgagatagaataaaaagcagtttaccacgctctatattgaaggatactcaattgaagctttcttgggcgaacagtttcaaattcactacgtggccgttatcgcgtgccgtacttgacgctttgtcgcgacagtctggtactcccttcggcctacgctctgtcactatttgagtcgtattttcagaaatgcagagaacatggctaataacgaggatactgacgaggccatcatcattgattcagatgatgacgacttggaggtgacgcactatgcaactccgaccgctaggggtatgacacctcttcgacgcgtttgacagacagctcacattctctcaagacagattttccggtctgaaacacggggctgatacaccggttaaacctgaatcgtcgcgcactcatctttccgagtcatcaagtgctgtaaagatccagcccgtggacagcgatgaggataataccaacgatggcgagctagcgtacaagaagttcaaggaacgcaaatccctcaagcgcaaacaagatgctgcagcaactcgcaaagccaaggcgcccaggagagatgcaatcgttggtcgaataaaacaagagcggccaacgcctcggccaaagcggccgttgaaacaatggggcgaggtatcttcagatgatgacctaatggagaatacattacctggatacctcaaaagccgccgcagccagttcgaccagaagctcgaacatctgaaagatcatggactgaagctaccacccacctatgaggatgtggacttctcggatgatgaacggcttgaagaactgcaagaacgacctgtctttccggataatacccgaaagcaggagtacaaggacatccaacttccctattcgatgggtattatacccgccccgatcgcccagtggttgcggcagtatcaagtggaaggagttgcctttcttcacgagctgtttgtataccaaaagggtggcgtcttaggagacgacatgggtcttggaaaaaccattcaggtcattgctttcttaaccgctgcctatggaaaaacaggagacgaacgggacgcaaagcgcatgcgaaagatacgcagatcggacgacagcgcttggtatccacgtacactcatcgtgtgcccgggaagccttatcgccaactggaaggctgagtttgcgtgctgggggtggtggcatgttgaaagctaccacggggataacaaggaccttgctctcgatgcggcgaagtcagggagggtggaagtcctgattacaacatataccacttatatgaacaacaaaaacgccgtcaatatgattgaatgggactgcgtcatcgcagatgagtgccacaagattaaggagcgcaagtcggggaccacacagtctatgaacgagatcaatgcgttatgtcggataggcctcaccggcacggctatccagaacaaatatgaagaattatggacccttctcaactggactaaccctggtgttctgggcccggtaagcacctggaaggcacaaatttcggagccactgaagatcggacaatcgcacgacgccactctgagcgagctcagccgagcacgaagaacagccaagaagctggttgagaatttacttccacaatttttcatcaggaggatgaagtccttgatcgcggatcagctgcccaaaaaggtcgatcgggttgtcttctgtcctctgactgagacacaagccgaggcctacgagaatttccttgacagtgacattgtcgattatatcaagacatctacagaaccatgcgattgtaggtcaggcaagaaggccggctggtgttgtcgccgctttatccccgatagggaccctccaacctggcaatcctatgtgttccctgctattaatgtgcttcaaaagctcagtaatcatctggcaattctaatcccacaaggagcagacccgaaggagaagcaggaaaaagatagagattatctggaacttgcgctgcctgaacaatgggaagacctttaccgctcgcgcgactcgatcgtcaattacgcgaaccctgagttttgcggcaagtggaaggttctacggaagttacttaagtggtggcattcgaatggggacaaagtcctcatcttctcgcatagcgtgcgtcttctcaagatgttgcaaatgttgtttcatcacactagctacaacgtcagctacctggatggatctatgagtttacctgaccgttcaaaggctgtagacgagttcaatgccgactcgcgacagtttgttttcctaatatcaaccaaggccggtggtgttgggttgaacatcacctcggcaaacaaggtggtagtcgttgatccaaactggaacccatcctacgacttgcaggcccaggatcgggcctaccgcataggacaacttcgcgatgtggaagtcttccggctcatatctgccggtacaattgaagaaatcgtctacgctcgacagatctacaagcagcaacaggcaaacattggatacaatgcaagctccgagcgtcggtacttcaaaggcgtccaagagaagaaagaccaaaagggtgaaatatttggactgaagaatttcttcggatatcagaacacaaacatcgttctgcgcgatatcgtcaacagaacaaatgtcgccgaaagccgtgcgggggtacaggtcgtggacatagacctcaaagctgaagaagaaggccacgactacaccgaccgaccaatgaaatccgaagacgaagcaatgagccaaatcgcggcgatgatctgcggcgaggacgaagaaaaagaccacaagcctcccgccggtcttccaatggcaacaccgcataagcacgaccccgttcaagcgattctggcaagcgcaggcgtggaatatacccatctcaataacgaagtgatcggttcctcgcgtgttgaggaagatctcagtcgtcgtgcggaacttgctccaaatgacacgacaggtgaccgtcaggtcttcatgtcctcgcagccttactctcagccaacggagcaacctgtgcgattcaagtatcatcctccgggggatgtcatacgtcgccagttttgtagtatggcgcggcggtttgggtacgctgacgctacggagtttgcgctcgttgttgagggcatgacccaggcgcagcggcgagcttgtctcgatcagtggtatcgagagagaagagagaaactactttctgcggatcaaaacactaaggaggagatcaaagacgaaaatgtttctaaggaggatatggatgaggatgaatggatcaaagatgacaagggtcccaaggaggatagtccgagtctttaagtggttttgctttcgttgttgttccttcttgcgcgatacccctttctggttgtataactagttgtataacatgcatgaaataatacgatactggaccacactcgctatatggaacctgtaaatcgttggtattaaaccattctcttagtatggctgtaggtaaatagatacccatgcaagatcacaacataggcggggaatcaaagccaagccaaagtccacaatgccggtaaattgggatatcgttcttgccaatccgccaatatctcagggaccttctcgtcaaagctctggcgggcagggccagtcccgtttgcccagccctcagagccatgaacaagatgctcagcaacagcagcctcattcagatgattggccagatcaagaatcgcctttccaccagtcaaggcctcctcgtggttatccttgatatcgacattgaagacatgaacggggtaattgagcgtgttgcccttattcatcaaatcgtcaacaacagcatcccaacagcgctcttcacaggtgatgatgacatcgacgactccaccctccgttccgatcgcacccttgtcgtccttggagaggttgtcgatgcgcgggacgccagggacccagtcctggaaccgctcgggcccccacttcagctggcggttgcggtcgagcatgttcaggatgccgttgccgcggtacagacgctcgtctttgctgcacaactcttcgtacatctggttgtaggaggtcgtgttgaagctgtacacgtttggttgggtgattgatgggccggggagacggacgagggagcctgtgccgaaggatatcacggggaaggctgttggggcaccggagagctggagatgggcttccattgagcggttgttgtttgaggcgcagactgtgcagaacttgagcttgtacgagtctgttgctgcgccagccgggttggctgtttctagggcttgggctgctgaggccatgtcggtttgtgtggatgtctctggtggtggagggggaggaggaggttggggagttgaagtccccgagtttgttcggcggggatcatatgccattttgatggaagactatggagatgataatagagagagagagactaaggggttgttgtttctagagggattttggaagtcgatgatcatgggggttttttgagattacaatattctgttgactatcagacgcgttagcagctgatttgagattgtttttttgtgacatgaaatgtgataacacaagttcagaaaaaaagcgtatatgaatttatccgcatagcaaaagctcagacagctccaataatatattcatcaggttgagggaaggagaaggtgacacagcacacataccttgtagttatcactcattatccagttcaaatgattatggggccgtagccctgggagaggagagaagagcaattttggtgaaggttgaaaagcttcgttttgttagtgccctggattagtcatgtagttaccgcctgttattccgcctggatagaagagctaacggggtaatattctgccggacaaatatcattgaggtatcttgaatctgttgtaaacatcgtccttttacagatatctctatcttataaggcctctgtcacacttttcacttttgtttactcttagggtatccatcaatatttaacttctcaaagcttttgaattcctctatattcctgtccataacctctatcaacagatctctaccccacatctatcaaaaaggagactcaaatggcagcaaatagtactatcaaaccagccctgattgtggtggacatgcaagaggatttctgccctccagtgagttggataagtacactactaggtcacacatactaatcaacagtagcatgggtcactcgccgtgacaggaggccgcagcattgcctcgataatcaacactctacttgcaaagccgggatttgtcgtgcgcatcatgaccaaagactaccatccaaaggaccatatctcatttgccagtaatcacccagggcctgacaatcagcccttttcttcattcgtcacaatgaagaatcccgctcgaggaaaggaatcagaaacaaaaccacagcaactctggccagttcactgcgtggctggtacccccggcgcagaaattatcccagagattgacacctctagcgaacatctagttgttcgcaaaggcatgcgcccggaagtcgagatgtactctgtgtttgctgatgctttcggaaactgtgaccatggaaccaacgcacattcggtcagtctagatgttaccgcggctctcagggctcaaggcgttacagatgtatttgttgtgggcttggctggggattattgtgtcaaggctacagctcttgatgctgcgaaggttggattcaaaagctgggttgtcgaggagggaacaagatgtgtcgtgcctcctgcttgggattctgttaaggaagaacttgagactgcgggggtgtctattatctctatggacgaccctatcatcaaggagctaggagggaagagttgatatgtcttatttctcatcttgcttttaccacgcagttttcccttccaagtgtttatttttccgtgtcttgtgtctaatatggattcaagttctatgctaccggccttagatatctattgtgtagatattatgaaggtgctatagatagatactgtattttcacgtgaatgtgttactttaccctgtgtggcggtattctcaattcttgatttccacagtctgtggttaaattgaagaccacaaaccaccgatatgtatacttgaaacaattccaatgtccgtaatcagtcagtacaataagatcgccggtgggtacatgatcgacaagcaactgccagaaacgtcttgacttcataccccctttccgcactactgcagagtgacgtcgtgtcaaggggggattcaccactcagcatacaacatagaatatcatatttcactacaggccgaactagatcagttcaaaactcaatctgcgcgcaatgctgcactccaggcggccatcaatgcccgccccaatcggtaccctcgacgagaaatcgaccgacaccgatgaggcagccctacacttccacgatcacagccaggcctctggaagtctcccatattggctcgtcaatttacctcggtcgcaatggactgccgagtgtcctagttttctacgtgaccaatctccgaagaatatcaaatgcctctcaatccctgattgccggtatacccgacaggactgggaggaagtgaaggagatcataggtacagctgctggttgggtgattagtgatatacttaactaactacaacttgcataggaaccaaccggatcgaccggttccagcgggtcccaagcgagctgcgcaagtatctggaatacatggcgcatatcaaagcggagtatacatccgtgatgagatttgtggtcaaggaaaggctgggctggggggataattgggaagagatcaagcctagaggtggccctttcgaatacgagggtatggcgcaggtcaccgggtctagaacgcgtgaaatactaattgtctgtatagaggatatccgaatcatatacaatgactggccatatggtgttgccaaggatatcatccacttggtagtgtggaccaagttcgagctggaagatgacccaaccacagatgacctaatggcaagcacacgagcggccatagagagctatgtgcaggacacattttgctctcgggtaccacccgaacaggtatgggggcttagtcggcatgaagatgatgaaaggctgacaacataggtggtctggttcaagaactggaagtcactcaagtcggtccccgggattgaacacttccacgtcatgctccatcgtcccgatatggcatttgtcagggagatcacccgcggagatgtacctctgattgaacggctatgatgtctgtgtctgtgggttagagaagagagagaagagagggaggatagagggaagagggagagaaaagaaagattctcctttccttgggtataacttaggtaccaagcataagatacatatgcagcccaaggaacgggtacatcctgtagtccccgccaagccagatgcccctcactgacgatcttggggaatgagatgtaaaggagtgtattcatcttgaaggagaggtcagagaaatacgtcactagccctgagcatttgcatgtgtaatttgcatttcgcatatctttttggatatcttgttgtgtaatttttagtgtcgttcttagtgtctttttcaattttttccctttgaactacgcaaatccgtttttttgccctttttccacttctccatagtaaaaaaagcccgttcccgaaatttccgccccaagtcagctgtcttgggtttcagacgttctctttttgtgttttggttttctggttcttctttatattttcataaatgtttgaaagcttaaagggcttttcgtataattcacttccgaacgcagccatgcctgtcccgcatctccgccgtacctcccaggccagtgagtttgacccttcttatccctttgtcatacatccaatacattcaaagcatttcaacatggcaatcaacatggcaactaacgccaatctaggcagatcatctatggaagattctccggcaagtggggaggatgaggtggttgagccagagcagggaaatggtgcgtccaaaccctcgataccccccagacacacaactgacttgatatgcctgggcagttctttcacatatcatttctcagctacggcctggcgccgacctgagtcgggtcgtcttgccgacattcatcctcgagcctcggtctatgctagagcggatcaccaagtgcgttcacacccctccaagcagggagcttggagctacctaatatttagatatatcgattaacacaacggtcttactagcttcatggcgcaccctgaaacgctcctcccgatgtcagagatcgaggacccggtcgagcgctttgtctccgtggtcaaattttacctgagtggatggcacatcaaaccacagtatgtcgcccgctagctgtctgtctaggaacacatactaatacccacatagaggagtgaagaagccgctcaatcccattcttggagagacttttacctgctactgggactatcccgacggaacccgcgcctactacatctccgaacagacctcccaccacccgccaaagtcgagctatttcttcgcagcgccggaccataagattcgcattgatggaacactcaagccccgcagcaagtttttgggcaactccgcggccagtattatggaaggtattgccattctgcgcctgatgagccacggggataaagaaaagggtgaacgatagtatgttgcgccgctttctacggactttcaggcactaaccaaaaccagtattctaacccaacccaatatgtatgcgcgcggcattctattcggaaaaatgaagtatgagcttggcgatcacagctacgtgcgttgtcccgagaaccacctcgtggccgatatcgagttcaagaccaagggatatttctccggcacttataacgcaattgggggaactatcaagaatgaaaagaccggggaggtgttatatgaactctccggattgtggaatggggagatgtatctgaaagatgtccatgtacgctccgccttccgaggtttcttcccgattcaacgctgacccagaacagacccacaaacaagacgttttgttcgacgcgaggcacgcgaagcattcgcctccgttggtccgccccatagaccagcaaggagaccgggaatcgcaacggctatggcacaatacggttgaagcgattgtggcccggaaccatatacttgcaacggacgaaaaaaccaagatcgaagaccgccaacgagacgagactgcgaagcgcgccgacgagggaatcgactggcaccctcgccttttccgtgccgtccaaggcggccctggcggcccggatgaaggcgaagaagacctcgactggataatcaatgctcaaatgtaagcacgaatgctccagcggttaacacaataactgacagtcccagcgacatgcaaaatccccaggtcgccaccgagcagatactatccatcgttcccatcgtccaaggtcagaaggagtcatcccaatttcaaataccgccgcatcatccccaccctatcgctcccgcgaactaggatatcaggcatatccctccacaaccagctaatgccgcacccgcagactccgagacgaaaacaactgtccaccagagcatcgtggaacggaaagatagtcaaacatcagaagaggagcagtttgtagacgcccaggaaacctcctaagtcaacccccaaagccccattgcgtccgactcccaacccccgggcccccaatccatgctatcaccgacccaatccaactcggtcggttgcgaaggtcgcctttttttctcactctcacatctgaatgatcccggagtattgtcacactccctctcttcctctcttcctatcttcctctcattctgccatgacgtagtcaacctgcgcagaaatccccagcacaaccacaactcgaggcgacggcacgacccattgtgatagccctctctgcccctctgatgtttcaacacagcgtttttctcggtcatcatgccgctcctattgctggatacccgatctgattttatttaaaaattcaaaaattttcaaaattatatctcaactgaacctgggcacatacatctctaagggatatggaagagatacgtagcaaggttttaatgcagcgttaaggagacataaaacaatagaacaaacaagagtcacgggaatctgaaaggattttatacacttaggacctggaatcttcaatctctgataaatctccccatttgctcaagtccgtagtattgactgatcgattaaatttgcgtcttctctgtccgttactatacaaagctctcctagaagagagggatatcacaatagatggcaaccacccatgccaatattaccatacaaagacaaccgaaactcccctccgttatccgaatacatacaaaacgccgcgtcaaaccattcttttgtcctaggaggacttgccgtcataaagccgcactgggaaagctcatgaatacagttcccccctggatccagctccacgctccagatcccgccgccgattaggccgcgggatagcaccagcagagccagtataagccaagccagaaccagccgccgccgccgatgcagcagacatcgacccaccgccctcatattcctccatctcctcctcaacccgaagcgtctcctcctcaatctccttctcggtatcctcacgcaaacccaatatgtccgggggtataaagctcatctggacactaggcgcgcccttgatatacctcagctgctcatggacggcctcaacaaggccctccaggtacgcgcgaggattcttattatcaagctttcgcatctccgacaggggcgggaagagtgagaaatcagggccgaagtggttacggaaggcgacagattccgggatcacggggtcgatcatgttttctgcctcgagcaaaatcgaggtctcgtgcgcccacgcacgcgagacgttgcgcggggtgtagccaccgccgccaacgaccatcatgggcagcttgaaggtcttggcgtatgcgacacaggcgccgtgcgcgcgcacgttcaggttgaagcagcctagtcggtcgcagcccagactgtcggcgccgcattgtaggacgattgcgcctggttggtaggttttcatacatgcaccgattacctctttgaatagtgctatgtaggactcgtcatcgatgccgtcgttgagcgggacgttgatggcgtggtgggcgcctgggttgagtgggtgtgcggggcctgtgtcttcgcgtgcaccggtgcccgggaagaagttgtctttgtcgtatttgtgaaaggagactgtgagcacgcggtcggttgaccagaaggcctgctcaacgccgtcaccatggtgtacgtcgatgtcgatgtacatgacgcgcgggtggtggcggaggagctggagtgtgccgaggacaatatcgttgacgtagcagaagccgctggcttcggcctttttggcgtggtggaggccaccggaccagttgattgcaatgtcggattgattgttgcagagcttgcgcgcggcgtcgacagtgccgccggcgtatagcgagctgtagctgtacagtccgtcgaagatggggcagtcgtcgccgaaattgaagcgcaccacgttatctgcctgatcggggttgtccatgtcgccgggaatgatctgttggaggaagtcgaggtagtctctctcgtggaagtcggccatttcctcgtaggtcgctgcgcgcgcaagatacagatccatggcgtggtgcatgccgtatgccatgacgagctgtttagtaagtgtgaggcgccatggcttcattggatgtgactggccgaagtggtaaggctcgacggctggattggcatgccatgatacccggtaaccttgtggacgagctatttgtaggttttgaagctcggcgagggacttgtagtcgacggtgagggtcggggcgggcggtgcatattcttgaacgacggaggagcgagccatcgagggagtatttgggaaacgacagaggatcaaaggattggcgctaagttcattttagatgggccaaatggaattcgagatgaaaccgcaggaagttcatgactaagcgaatctgcggggtggccaaagatcgccatgtttagtctatgaaaggaaggaacagacaaacaggaaggagcaaagcacctaggcagttttcaattgaaacggaagatagaagagcttctcaattgacatcaattgcctacatcacaactataaattatactttgcctatagtgaaaactattctgtactgtcccggtagtgccccgcttgaattgctggagctcattgtagccctaggtctgcgtattcaacgttgctccgtttgagttcctcctgtgatgattgtggcattaggagatatcaggcgatccttggtatattccaaggttaattcacaataccgcaacaatcgatatctggtaatcacaactacaccgacgatcttcgctgaatcaataagtctacataggtatctaagctacccttgtgtttaggatgttgatgtaaaggatatggcacttcggggcgatatcggccgcgtggctctagataagtggagagtgcacatcatccagggattgtaattgcccgaaagaactcactggtggagaagtgatggtccaaggctggtatcacatgtcctaccgccggagagaaagctatttgcacggctcgttcctgaggtgaacatatatcagccccgagtcttcacttagacaataactatacggatatcggattagccggcaagccactacatcactactggttctgtttcttagtatacgacaacaatcatggctcttccatcggcagcaaccagcctgcggcgatcactgcaagatccccaagtattcatcacagccccaggagtatatgacggaatgtccgcacgactagcactggcagcaggcttcgacgcactatacatggtatgcaatgcaagatgaccaaggcatcctcatccaagccccgagctgacaccaaccagacaggtgccggaacagcagcctcagtacatggccaagcagacctcggaatctgcacgctgaacgacatgcgggcgaacgcggagatgctcgccaatctctcaccgcgaacaccgctgatcgccgacgccgacaccggctacggcgggccgatcatggtagcccgcacgacagaacaatacgcacggtccggcgtggcggccttccatatcgaagaccaggtacagacgaagcggtgcgggcacctctccggcaagcagatcgtcgacacgaagacctatatcagtcgcatccgggcggctgtgcaagcgcgcgagcgcataggtagcgatatcgtgatcattgcgcggacggactcgctgcagcagcacggctatgaagagagcttggcgcggctgcgggcggcgagggatgcgggcgcggacgtcgggttcttagagggcatctcttcgcgggaaatggctcgtcaggttgtagctgacctggcgccgtggcctttgctgttgaatatggtggaacatgggtccacgccttcgatttctgccaaggaggccaaggagattggtttccgtattatcatcttcccgcttgcgactttgggcccggctcttgtggctatgcgggaggcactggagaaattgaagagtgatggcttgcctggtctcgacaaggagttgactcctcagatgttattcagggtatgcgggctggatgatagcctcgagttggatgcggccgctggtggtgtggcgtttgagggtggcgtggatatcggagatgaatgaacggaagaccaccgcctaccagacccggtaccggagtgagatattgtgcacattgaacattggcaacttccccttaagagtatcggcctggacttatgtagtaccgtctccaccagtcgtatgactctattttcgcattcagccacattcattagtaggaagtagctgattctttgaagcgtttctcgaattatcatctaattaaatctactaaattttatatgtggctttcttttgtggttagggtaatttgacaggtagatttaatttcctataaccaataggacaaattgcagatcgaccgaaccgaggatcctcccgggtcgaccttggttttgtttatttaccccgagatttctacttcgtacggtttcctacaacaaggattttaagagtgaggaaatttagagtccaagtgtgtacatatgtattcaagggtcgtgggtacctgcattaagtgaggagtctgccagggactggctcctgcacgaattagccctaatgtttcaggaaacgcctgtggcaacaaaatgcccttggtgtaccgtaaatacggactcaaaaatacacgatataggtacgatgcactacttcctccgtacacctatggagccgtggcaagccaagcgcgcttaaagtttcaatgagtctaaacagatgaaaccgcttcacggccagccccagtttgccgagttggaaggtctggatccccgaggggccagtttctgcgtgccattatggagacaatcaggagactcgtcatgtgggtggggaagggctaagacgctaccggtgaatatatgaaatatgttgtaagtgtgtgccttacagaaaatatccatcggccgtgtagggggtctggccgcagatcaacggcagagattgacttttttatgcgcatatcattgggtccgatgggcagggcgaggacaatcctcattaattgcaacaagaattgtaatggaagaactaaggagtagataggcatgggttgggtagggacatagatgttagttgcccattgtccacgtatttgtacacgatgcggtgatgagttgtctccattaagattgccttgagattcgtaacacagtttagatccttgctgtgcccttcgccgattggtttatgtggagatttccggacgacggggatattaaagtacatgcgtaagtttttatgtacacgtatgttatacagaaaccttggtcatattgcttatagaagtatcaatgttgggctctggtgcagtgtatcgagatgactatccagcattccgatcacgcacgtgtttggcattaggcaactatacaacatagaacactatcaatcccaataataggacgcataataatagaacatacggggtacggagtactccgtatgcgaattatatagaaataataatacaacatactgaataggagaaatccccctatcccaagtcacgaatacctgcacagccgcgatgagaggcatagtatagagaagtacccagtaccaaggaaacagagtctgggccctgggcagcccaccaatcaaatcacccaaaacaacgcacggccaggaaccgccaggaaccagccaataataaatggcgtacccctgatattctggagccttttcgggtttgggttcaggtcccagcctgacccgttattgtgtaacttggtattgtactaatagtctctagtccccctagtccactttgttctcttcttctctcttcactctcacacacattcatttgaattgaattttcttctcgtcgagcgtccttttcgctcaagtcactcattttcaagttattcaattcccaagatgcatttctccaactccatgctgttgatgacggcgctgaccgctgggtcggctgtcgctcgtcttcatggccacgaccgccgtcacgcccaccccagagatgtcaacgtcgcagtccagcccgctgtcactgctgctgccgaggttgccaatgttgataagcgtggcgaggaggtcttcgctaccattgacggcaaactcgtctcctggatcaacaactggttcggcgacgagacctcgactgcctcctcggaggctgctgagaccaccgagtctgtcgctgctgccacttccactgctatttcctccgccgaggccacctcgaccgccagcgccaccgccgttgcctccagctcctccagctccagctcctccagctcttcctccagctcctccagcacctccagctcttctagctctagcaactgggccagctacccctccgatggcgtttactccaccaccggattcggtgcctccactgccagcaagcgcgttggcaccctcgactgggactacatcggcaacgtcggcagcccttggggtagcaacatcatccgtgtcgaggaggacactgccagcgagtacaagcacgttatccgattcgagaacgacaacgacaatgcctggaccgtcaccatgtggaactcgtacggccccaccggcggtctgaacggtttctggagccccaactccgctctgaccttcaccgttgagcccggccacagcaccttcgtcgccatcgatgacaactcccagggtggttggggtgccgccgagggcgaaggtctccctaccaacaccgtcggcgagtacgcctccacctggggtgaattcgacatgagcaacacccagaacgacggttactccggctgggatgtctcctgcatcatcgctgagcttgctgatctcgatattgctggtatgcagatttgcaaccacgagggtgcgaagtgctcctccatctccagcggtgcctccagcgttgtcagtgcctacacagccgccgaccagggcaagaccgacaaggccattgcccagtccgctggccccgtccgtcttgttgtcaacctgggctggtcgtcttaaatcgtccatgctctttttattttttatttttttttcagcacctcccatttctaacaatcttatcttctctaccgagatttcgtctttcttgcgcaaatggttcaacgccgaaggtgtctttgtatctttcccctgattcggtgtgtgcgtgcgcaggtcgcttgccccagcaaccatcctggccacacatccttccaccttcgagcggctcttcgacggctaccttttttttgccgttgacgttctcatacatatctttgtggtcatgattgcctccatcgtctttttctctgtacatataccatctgaagcatctgatttgagagttgatatcatttcctttatcatttcatctagaactggttactatatatactttatttacttaacggccattgggccccgatacctatggatatctaaatataccatccattcactattctgtctgttcatctcgccggatcattagtgtcgaggcctattcgtcagtcataaacctgaaacaaaccttatctatttcaagtctcacctaccttaaagctgatgtgcatgatccttcggcactatctgtatgtcttgcatgaaagctaccccttgttttgcatatcgaccgatgaaacctaaatgccaggcccttccagcttcaatacaacaagttgaatacaagtcaaaatactacgaggacactatttagggctcccatggttgaatgtacgagagatgtgaagtgccgagttagggcttgcgaggaatgccaggataccacattgatatttgacaagaatggatgtttccgaggttttttcgaggcctcgatgattttttccatcgccaaaggaatattgcgttctttggaataaattgagttcgatataaattccagaacaaaggagacgtttcaagtagaggaccaaaacaaagacctgcagttctgatgtgacgaggaaccgtacgaaggccaacacaatacaaaggatagaacgcaatgctatcgtacagtcttagctttcacccaaatgataaaacaaaataccgaccccgtaacatccacagaacaagcgtaaagacttcagcgcttagaacgcgcccaggaagtcagccgccgacccaggatcaagctgtagcacaccggcatcttcatcaagatcctcctcttcctggacacccccagtcgagaaagaaagcaagcccacatgaaccatatacccaacgagagcagccgtccccgcaacagcagtcgcaacagacagcaacatatccttgttactcgaatcggcatacgaagacaggacctgtttctccaccgcgctaaaccccgaatcagcctcaacgacctgcttcaaccgcctgttctggcgcacctcgcgcaagaacggcgtgttatcagccagcgtgttgaggagtgtagacccgacagcggcgacggagatgcgctccggtgcgcgccacggcagggcagctgtccccgtgggctggagagcatatttagcatcgacaggcgcgtcgccgaaacagcgactgcacatgcgctccgtgtacgccgccagcagcggggccttgatgcgcattgcgtcgcgcagccaggggaagactagcttcgggacgagcgccagcgacaggtagcccagcgcgagacagtccagcgaggaggggttgttgttgtcgtcggcggggagcaggcaggtcttggtgcgggcgagcatggcttcgagcggctcgaagaagtcggctgttagggcttccaggcggaactggtttgtttgcgcggtgcggccgaggagcttggagactgtgtcgcggggctgctggatcaggttgctggggatttggccggatgctacggcggcggagtgctcgcgtttgcgctggtcttctagtgcttgcaggtctagtgaggagaggccgaggtgttccgtgcgggttttggcggcgccgtgcagcttaggtgggaggatccattggtttggccattggaggagagagccgtacgctggggatgtgttggcgtagtagttctggctggttacgtagaggtacaggtcgatgagggattggccgcgagattcgatgaaggaggagaagctgaggggaggggttattgttagtattttgtgcttctcacgccgttgtagaggtgggagttgcgtacgcaacgctatcggccctttgcactttgtctaggttttgatccaggttccatgctccctccgagtattggcggagatagtcgacgatgttctggaaccggctcacccagacggagccattctggagagcggggagctcgcctattggtaaatcatttgttagctgtctgattccggtgatgctttttttttttgttccggtcacgtcactgacctgttggggacacggatggatcgctgctcgcgatcagctcccacgagtctttagggaggacctcggcacagtatgcaattgcagcaaggcatggtgcgtcaattgagggcagcgaaaaggccgggccccatacatgcaattgtagtaccatggtggctttgcgcttggagaagaatggacatccgcgattgatttgggccggcgaatcacgtgtgtttgtcctcggcttgatacatggcttctataactacatgtcgagatacaatgtttattcacatcaatcgagcttggattgtttgtagatgtgatcttcatgaaatcagataaaaatccctcactcttctccaaaatggtccgttctcgtttaaccatagtacgatgtatatatagcacgtaccagggccatgccatcttcaacatccaagtcaaaatagaaataaataaaaacaataaagtgtcacgctaacccccaagcttcttggaagtcattattaaataaaataaaaaacaagatgtggcttgaattacgaactaggcaacgccgttccattctggcataatcattgataattagctcagtatctcgttttggatagattgccaaccttcccggattggaatgccagggattctcggccagggattctcgagacggcaaatcggacatgtatatctttcactgccccaaagcatactccctactcgacccgctactcccgaaggtccgggcatcaatctcactcagccgggtaaaaagtattgacgtcaaactcaacgggcctcagtcgtacgacgcagggcatctagaacattaagagcctcaatattcatattcaccgcctcgtggcacagctgagcaccggcaatagcgcccaacgcatccgtggtgtacttatttcccgcaaggttcctcctgcccaagacaggatccttggccgccgtatacatcacgagattcccattacaagactccatatctccggttatccgactatagtgatatggatacccaggggatgacctcattcggcgcacgtggctatacaagcccaggtgggccacggacttgtcaaccggtgccttggaagggtttcagggttaatttcagaagcacagacgtccccaagggcctgagacacgttgagtcaaaactttaggaatcgttagtttgattaaatatggagattgtcagggcgagcgttacggccggaagcttactttctcctaggtacttcctagattgtaacgcctgaagtgaaacaggaagggaaaaaagtcaatttgatacaaatccatggaaggcgtcgcggataacaacggatataccacaaaagtgtatcgggttgaggggtagaggcgggggcagacacttgggaacactatctgcgagatccattggacacagattgccgggatttcttcaatgacgacgacatgcaactttatcggtcgagtgatgggccaacggtgaaccaggataccagcacgcccacctgtggggatggtctaatgacaatcactgctcgactatggatgattggttgtaattggttagaagaagcagtctgagcatggagcatttgttggtccagctagtactgtactggaactagtaacaatagtgaggccaacctccactttgctatacaactcgtaacaggaaaatgcagggcacgtaccaaacctggaagcgctcggacggggccaagctcgtatcttccttccttctccgctcggccgtttagcgtttaatgatagtattacgagctaaatatacacacgctagggaaggtgtcgatatgtcctagtctggcgaatattggattccgtgtcgagttgaatagtatggtgtgatttgagactagggttgagtcgggtgcaatatggcatatgatacccgatatatatacggattgcacaatatatatgtaaggccatgtggccatgcatcgtactcgatgcggcacatgcgctgtaaaccataatgggaggctcgataaggatcgcgtcagatcaaggctacttcagatcttatgatggaagaagtgcatgggcaatctgcagatctctagattggtctatcgaccagtgagtcatagttgacgtgtatattcgacctcctcgtatctggggtgttgattaatgggtgaagtatgcgtcgattcgactaccgcgacacccgccttcgtgagatccctgctagcttcatgactagtgattgctgcgggatgctgcctgattagtgaaacgggtcaggtgggtgtcacccgcagtttcccatctcgtttatgcacgacatacgtgtggaccatacgcaattaagtaaatgcaacgttctagataaaagacaaattgctctgttgggtatactaagtctatgatacatgtcgattcggattggccagatgcaggaaagaaaggaaagtcagaaaacagaaagggaacaaaaacaggattaaaaaagaattccaggcagtcaagatgaacaggtcacaacggcaggaaaaagaaaagaaaaaaaaagacactgtgaccagcaaccagtgagcgaccgagttgatccgaggtaccaagacaggaggggttggccaattaatgcgcggcggctgaggagctgcaccttctccgcatctgcacgtcacagatggtcaaagatcgaacagctgaaacaaaagccccgcagacgaccggtgatcaacagtgtcgagagttgaagtgggacaaagagcaagaaatagaaaggctattaatgcacgaggggtagcgccggcgctaggtcccatagcgaacgagttaaggttgctgaagagcgagagaaccaagcaaaagagaattaaaaagtgtgtccgaggcccattcgaaacaagtttttcagcgcgcgtagagctgcgatggctcgcgaggcgtcgaagtaaaatgtcaagagatgtgaatggacggtggaagagcgagcgctctctttgtgttgtccgtctcaaaccccaactttaagcaagggcgtcctttgtttgggcggaacgtagtggaaattaggtgttgaaagtccgaatcgaaacaaaggatcgcaggtaagagccgaaactaggtcgaagtcgaggtcgtgagatccatgctgagggtccaggtcgtgggcggatctgggaggaccagaatgcgccagagtcatcatgttcgttgagaaaaggggactgtggactgtttatttcggcagcggaggcaaagggcccttaggaggaggaccggggcatggagggaactgagaggatccgatggaaggcattgtggttggaaggttggaggttggaggttggaggttgaaggttgaaggttgaaggttggaagttgggagttgaagttaggaggttgagagtcgatcgtagttctgacaacagactggaagactgatgggctagtatatgtagcaagatacgatgtgagtagagtagatttggatggagagaagaaggggaagaaaaaaagttaaccggagcaggactcttatagaaatcgtctgcctttcccccaacctttccggccaaccactaattacagactaaattagttcctaaaatccccatcggacatccctgccatgaacaggaggctgagtatccacctgatctgacgtagggaattttattgcgatttacttgctcgaattagcccgggtaacggatgaataatgcaccccaagtggaaatccaatggaaaattcccatttttttctagaagctctccactacttctgtggcttgtgtttcctgtgaaccactagtggaggagagcggaggaaaatgagacacagtaattagacatctatgccgtgctacctgagcaatatccatagtaccaatgcagtccagcatatatgggctcacttatgcagctcccaaatttatattcaggtttcacaacccccctctgcgtatatactcaatcatgaaaccacgcgagatgacaactagtaaagggcaatctcccgtgggcccaccgaggctccatagagacggtttcttgatgcggtgagaacgactttttttctatttttcttttttgaatatgtcatcttattagttgtgcaactgtacagagtactgccgtaattggaatatgataaacggcaaaggtccatgcacattcatcctgtatgactcaataggagagaacagcaagacgttagggcacaacacgtgcatgtttgcagatcccgagagcgaaggagcgttagcgggagagaaaaaaagcaaaggggaaaaaaggaaaatagaaaaagcaaaagaaaaaagaaaaagaaaaagaaaaagagaattttcattctttttagggtcaaacgggatggccgattcgtattgattacactaaaagggtgtgacagccgagttcccaagatgctgggattgtagaataaggataagcctgctcatccggcatcccaaacaacctgatatgacatatcagacacgcgctatttctgccagtttagcctgatacttatacgccatccagatagcaacaaacagggtggtacggtctcaggggccgacgagaaaagacggaaaaaaaaggataaataattccaaaataaataattcccaaaaataaaaataaaataaaataaaaaagcaagaggcaaaagcaaagcaggcttgaaatctcgaatcgaggacccatcctcaaccgtggtttctacccgtgctaccaaacaaataaagccgtgattgagacatgcaagaatagaaaagaactctttggggtaatgcatgtcagtcccttaacccacgggtttcgcatttacttctccgtaagcacttcggctattattacatttcattatatgcttcgtaccccgtacataattccttatcgtttgctcctcccgcttaggccctccggggctctaataacaatatgtaatacagataaaagccgttttgggtcgtttagcgtgtaccatcatctccgacggattacagagccgatcagcctccgcctatagtaggtgtggctgatagtccctaggtatgatcgtcttactgcagaggactgtgcattgcacatcatcatttggaaagcatgcagaatagcgtcgtacatctggagaaggatggatccttgtactccgtatgcaatatatgaccccagtccttatgtttattggctattggtgagcattgcatcgagaggggtttgtccaacttttccttcatcttcttagtggttacattgtgcacatcactgggcctggtgtttcacggtggaagatctacttcacccctggtgtggcgttcatggcgtgattattatgggtagcggttacttacttcgttgaatgtgtgtagtgtggtatgcactgaaggtcgaagtgtatataagtatatagtgtactccggacggactatgcagtactacttacctagaaattccctagcttcggggtgcttacaatcttccccggaaattacctggccctaacatatgtactgcaatggtcacccgttacattccgccatcattccctgtttttggcccttttgaaatcacggcaaatccaggcagagggattatattactgattgtactccgtactccgtacttctggaaatccacgcagatgcactccgccctatatagtaagcccgtgctaatctagaattctcacatgccctatgttgcaaatgcaggtataaaacatataacggtacccgggatttgcaaatgaaacccccgcatatactcaaaggggtaggtaaaaggaattacaaatgctatgataacaattggactccgtacggagtactcggtacgttactccgtagcaacagcataatttgactaggcctaccgcgtccgatgaaatgtacggagtccaaagtggggcaaagtggcaaagatacatctgtaccttggaaagctgtatgcgaccacacgggtgtacctgagctaagggtcggcgaaccaagaaaggggaaagaaaaaagtgggaaaagtggcaaaaaaaaagggcaaaacgcacatgggagaaaactctacccatgaactagcggaccgcagacttcaataaacgagcccaattaggcaaagtcagctccacttggatttccatctcaccgttccgcaccgttggaaataaaagctgtggagttgcgatttgaagtcggagatttatgacgagttcagcttgctactagtaaagagatcggaagttacccctgatcgtgctacgatcggtttgagatatctgatatggcctgtctattggctgttgatttagagccaagggattttaaagaagagatctgaggttgagtacacatacactataaaatatagttcaaccaaaaaaccctttttagccatgtgatttgtattaaattttcggtactgaggcttatgcccccgaacccagcacatcgggaccagaatacatacttccccattaagaaggtgttggttggggtcacgggacaagacggagacgggctgtttcaggtcaaggctgaagctccacttgagaatcttctagcttgccttctggaagttgcggcccgaggttgagagcccatagttaccacatagggttttcatatgtggaatcagaatgtctccgaagtaattggaatatttccatgcccttgtccgtgttctctgccgtgtcacgaatgcgaccgagacatgcaaaacgagaatcattacggagtacagagtaaaaaagtcaatatcacattatgtcttattgcatgcagatcatcgagatgtcactatttgcatgcacccctgtctcgtggttgtcatttccatctcagcggctctgtctgccggcaccgtgcctgaagaagtcatccggggagtctgacagcctgccacttgcgtgacctgtctgatcttcggaaacccacctgcccatcataaaataacattacacagtgcaattcatttcgcggtagtggcaaggtttaggctctcatcagggacacctagtctcgtagatcaaggagttgacagaccgcacgacatgggtccctgaacctatgattcaacaagatgaaacaaaatatctctcccgtttgcaacagggaccgatgaagcacaattttgtgacgtttgcagggagtttgaacatcacatcactcataatcgtattctgtgcttgacagtgcgggcagtgcgggcagtgtcacagggtcatgtgccactgatcatcccaccacggctgcccacagtacgaggttgggaaagcttgacagtaagcaaggtccctgtcagccacactgataattgccaggcccacaaacgctagctatctagcttgatcaatcgtcgtcaaccgacgcctgggcttgggttgaaatccattcttccatcagaggccgattcgactcagatgccgcagcacttggtctggctttgtcgcccttgcgggtgatcaatagacatagcacccatccatggataatgaagctctcataatgcgtgctaaaacggagcttcttttcgtcactgccagtcgtgtcttcaggtggcacctggccttccctggttgtcctccttctcttgctcgaccgacgtccattccctagggcaacttcatccgcagattcgggaatattatgcaattccagatcaggttcactgtcactctcgatcatgatttcgccatctgagttaaccttggcagctgtatcgcccgagacatggtctggtgccacctccatttgtacgtcttgatcttcattatccttcccctggaatgtcttgctgcgcgtgaggagcgaatggcgggtacgggattggcgaaggaagatggccacttcgaagtcatctaggtagtgtaagatacttgattcgttatacagagatagagaggtctataccttctataatgacatccttgactggcttgcccttcttgcgcaagaacaaccgctcattctcttcacgcagcttcggaaggaccgacggtcgaacggcagcgatgacgcgcgggaggacaggatcgcgagagtccaagagccatcgtgaatcgggtgggtattcgagataaatgcgacattccagtactgagtatttgctgatgcggaggtatcgtcgaataggtgccatgttcgaatgtgctgcgcaagggcgcggtcgagttccctatgacctcaagaccattgccaagcgctgttgccgccgacctctgattggcgatcgagacgcgtgcaaggggctgaaaggactcttgcctcaaggggctgtcaaccacgttccttcaaaaccttcgaatcattccagtcttcctatcctattccatacagaatgaaaagatggaacaacgaccacggaacacaggaaagacctcatttcctatacacgtgacttgatcaccgcgaccgcaatcggatactgacccccaaggtcctcaacacgctagtgttaggtaccgggtactttcggatgcaaccaaaattgtgtgggcgctcaagtacctggtaccggtccgatggagtagaaaaatcaatccttgacgtcttcgcactcccaaggtccccatggatcccctccagtgctacttcgtgattaatgtaatcaaaaacccgcaaattctgattcggttttgattctgtctttcctttaaaggaactcgttgatttattatctatacggttaggttccctcagaaaagcaagcctctatttccttctcgatatcttccgttcaatcagtatcaaagtcaggatctcctggtaattgcatgcatggttagtggatcaacgactcatctcgcctaccatcgaggaccttggggattgcagtcaagcctcgcacattctcccctcaactagatcacaaatccttctctcctccattggacaacttgcacaagtcgtgtgtattctgttcacttccattggctcctaaacacatccttctcgtcccacctctacacttccccatacttctcgtatcaccaataaaccgagatggaatctttttccactctcctcaagcgtgaggacgcttgtgattccgggaatgagttcgacggccggatgggcctgcggatctcttccgtctttgtgatcatggcgggctccatgtttggtgccttgttcccggtcttcgcccgtcgctttagcaagaatggtggatttcccaaatgggcctttttcgtcgccaagtacttcggatctggtgtgatcattgccactgctttcattcatctcttgggtccggcggaggaagccctgaaaaatgagtgcttgaccggtccaattactgagtacagctgggtggagggcatcatcctcatgaccattgttgtcctattctttgtggagctgatggttatgcgtttctcgcactttggccaaggtcatgtgcacgacgaggaaggcaatacccacacccaactcgatgatcactctattatcaacgaaaccaacgagccgaagactcacatgccaggcgaggatcaccttggtcatacccttgagcatcacgataacaacagcgactccgagaacgacatccaagcggttgaggattatgccgctcagcttacttcgatcttcatcctggagttcggcatcatcttccactctgttttcatcggtctcactcttgcagtgtcaggcgccgagttcattaccctttacattgtgcttgtcttccatcagacctttgaaggacttggtcttggtgctcgtctcgctacagttccctggcccaagtcgaagcgcaacactccctacttcctaggccttggcttcggaatctcgactccgattgccattgccattggcttgggtgttcgaaacagctacccgcctactggacgaaccacactcatcgtcaacggtatctttgactctatctccgctggcattctcatctacactgccctcgttgagcttatggcacacgagttcatgttcagcccctccatgcgccaggctcccctccgcgacgtgctgattgccttcttccttctttgtgccggagctgccctcatggcgttgcttggaaaatgggcttagaggggtctttgcttccatgatgatgagaaaagttatggggacactcttctctcctaataatgtgtcatgtctttgctttttctttgccagttttttttattatggtcagatattgtctgcatctgtgctatccacgggatccggagcagttttagccattcgtctatccggcgttattttagcgaatgtatcgccttcttaagttcatgaataataattccatcagaactattcaggaacagtcaaatagtagacacgtgcttatccgaggtataccaagccctaccccgaggtgaaccgtggataagcaattaggttaaattctataccaatcagaacaatcaaaagacgcctcaaaatacccctagcatccgcttaaccatttcctccatagggctgcttcctgactgggattccccgctccaactcgtacagcaggtggaaaatgggataaagaggagagaattacgaggggtgcgtgacaccctttgtttgttccctctttccttctgaaagggccacagttccaaccttttccaactcccatctctcaaggctgtcgaaatggcttcggcaagcgacttgaccgcgctccctaaggctgcgactcaagataatatcgaccaagttgactctgctccttcatcgggtatgtcgttgaagcaacaaagtctgtcagacctcttcactattgtgagtacttcatcctagcctattcataccagatttcttcttgctttccccgcactcgcggctcaagttagcgaatgacagactgaccaaagtggatactattcaatagtttgcaagcggcttcgctctgatcagcgatggataccagaacaatttgatgtgggtcgagcgattgtccccatgcacgactgtatctaaccacggaacatctcataggactatgaccaatgtccttctcaaaaaggaatatcctaaggagtacactaccacggtcagcacgcgcgtttcgaatgctctacttgttggcgaagtcattgggcaggttgttattgggtacgcacgaaacaatgctgattaaggctatggacgagttctgatgactgatattctatactagactgacatgcgactatctcggccgtaagaccgccatcgtctttacaacccttatgatcgtcgtcggaggtatcctggccacggcctcgcatggcgttaccatcgatggtatgttctggatgatgacggtggcccgtggcgttgtcggattcggtaagtgaccctcgatatatttgccttgcttgtatatctcaaaactatcattccgagttgtgtactctactaatcatcctcaggcgccggtggcgagtatccagcctcttcaacttccgcctcggaagcagcaaacgatctaaccccgaagcaccgtggcccagcgttcatcatggtaaccaactttcccctgtcatttgggggcccattcgcggtgtcaatcttcttaatcgtactctcagtttgccagcagtcccactacagcaccgtgtggcgggtgtgctttggcataggatgcatctggccgctgtcggtgttttacttccggatccgcatgctgaactcggtgctgtaccgacgtggagcgatcaagaaacacgtaccctacatgctcgtgctgcggtattactggaaagcattgattgggacttgcggtgcttggtttctttacggtaagagacccccccagtacttacagacgtgtagttactaacatatatagactttgtcactttccccaacggtgtcttctccggtacaatcatctcttcggtcgtgcacaacggcacaatcctgcaaacaggcgaatggcagctcctcctcggcgcgatcgcgctgccgggcgtcttcctcggggccattctctgcgaccgccttggccgcaaacccatcatgatgattggattcagcggatacctgatctttggcctgattatcggctgcgcctatgaacgcgttactaagatcgtgcctcttttcgtcgtcttctatggactgatgcagagctcgggcaatttcggtccgggaaatatgctcggtttgatttcgtctgagtcgtatgctaccggtgtgcgagggacttgttatgggctctctgcggctattgggaaggcaggtgctgctatcggtacacaagcgtttcagcctataaagactcatctggggaacaagtggacttttattattgctgctatttgtggcgtggttgggatcttagtgacttacttctttgtgcctgatttgacgggcgaagatttgagggtgcgtgatgagaagttccgtgcttatctcgttgccaatggctgggatggtgatatgggcgaggacgatttgcaggcggctgctgatcaggtcatggacccgggttttcgtgatgttaaattcgtgaatcagacggtgacggcttagaattgcggtgcactgcaatcgtcaggcatggccgaaggtcgagaatggggatatcataatatccccatatggcttccaaacccagtttccatatctcaattgtttaggtagaaccactgtgggatattcgcatatttgtagtccacgataacacaatatcttcaaatcccgaagtctatagttacagccacctacgtatctccagtctgcttcctttggcgtcgtaatgtataccaattagtgccttgtgagtcccctctctcgtctagtccaaagagcaatgataaaacctagacaataagcaataaatcccttgtagaaatcaccaattgacaatcatggactgcaaccgcaaccatacatgtaagcttaaagcacagaccaacgctaaacctcggtccaatctccgcccatctgtccacatctctccaattcccctctccccaaaccaccccataaacacaaaatgcgtctcacctccatcctcgtcgcagccctcggctcactcgcagctgccgccgacctcggcatcgaagtaacccacgctgtcgaatgcacccgcaagaccgtcaacggcgacggagttgccatgcactaccgcggcacacttcagtccgacggatctgagttcgattccagctacaaccgcaaatcgcctttgaccttcaagctgggtaccggtcgtgttatcaaggggtaagttaaaagctgcccggggctgtttgtggatgtcaatctgcaattgctgcttattatccgttgttcgcgtggaagctaattcgtgtgttcgttgtatacagatgggaccagggcttgttggatatgtgcattggcgagaagcgcacgctgactatcccacccgagttcggatacggcgaccgcggtgtcgggccgattcccggcggtgcgacgttggtatttgagaccgagttggtcggtattgatggtgtgaaggatgagctttgagtgtgcggtgcttgatacctacgtatgtgactatctgggatggattttgatgacaaggccgtcatattcggctaagaacaaatatacctttttgcatgcgatttattctatgatatagcagaagggtatctcatttatgtggggtaagatgtacactgtatacaaaccggctgaacaagtacagcgaagtaaaacaacaataataaagtggaccatgtatcagtccatcgcgtccagagcattctcggtttggatatcatgctcggaaaccagaattcctaccagacactcgccaaggatcccctcccagttgacccacgggtggatctcctggaacaactgtgcagagtccttccccgcgcctcgaaggagttcacccttcccacctggatggtaaggggcgtagggcgagatattgtacacctttccatggtacgaggtccaggcatcacgacccttacgtccgtgctgctccttcagcattgacggtgtgacccgcaaaaggcctgggggaaggccttcgccgcggagcttgttcttcgggttcgctgctagcgctgcccagtcaaggggcgagaatcccggctccagaaccactttgcgcgatgacgactttttcaaggatacttgtgtcggggctagggtgctgctgctaagacgactgccgctcctcggtgcgcctaggccgcgctgggaggcggctgctgatggtggtggaccgagggagttgccgctgagccgtgggggttgaagtgtgcttgtgggggcgaggcggttcgcctgagttgctggtcggggccgtggtactgggggaggaggcattagggaagaagtgccggttgttgttgctctcgggggtatagatggttgtggttttggagggggtgcgagggatggctgcggtggcggtttgaactttggtgcctcatggtttgtcgaaggtcgttcctctgctgttccattcacggtttgtggaatggacggcatcgcggcagcttgcgatgtctcgcttccgccgctgtctaggctgaatgtggggaccgcaaggacggggagtggtacgctcgaggccgaagccttgggtgtgctctgggaatcctcctcctctgtctctattgatggcgtcgaggcccgtgggccatgcttccgctgcacaggctcgcttgcggtggcagcaaccggcgcgtcgggtttaggttccggagaggcaaaagaacgaggttcgacccagctgcgaggagggtaacggtagagaaagtagcccgttgttgcgataagcacacccacagctacccaacccataccgactaaatcagaaaggcagtgaaagtgagaaaagtagtccagaatgttgtccctgattagaatcacaatcttgcagattcgccgagaaaattggtccgtgcgctataaatatgcaacattcgagatatgcttaatagaaggttaaatactatttggtcaagtgatattcaataattttgttaattaattagactaattaaattgagacatttagagaaaaaattgttattttctacgctgtctacccccaagttccgaaaagaaccattgcagtcaaatatcagacattgctaggaaagaaactatctggggagtaaaggaagaactccggggaagccatcggggaagccattgaaagccaccaattggatatcggtagtaaataaaacagcaatcgaaaacagaacgcgttcatgatgtcagtgccccatcatctacatatatcgcgatggtatgcccttaggagagattgattctgtatgccaactgcgcaagcatggttgtggctcacaaagctctgagggaccagattttccggaaatcaatttctacctcagacacagtcacacttcttgatgccggggctggtcaagtgagtgtcaaggcgcatagccctcgtacaattatacttatcaataatcaaatggcagtcccagggtggtaggaagcatcaagaggatcggagcacagtgatctttcccaatcattttccttcggaggtgaaggacgaagttgcattcttcgcaatctatgatggacagtaggaaaagcctcaaaatgcgtcctttacactagtctcgagctgaccaatatctccagtggttctggattggtttcggatcatgttaatggctgtttgcaccacttgatcggacagcatccggagttcgaacgaggtaattggcctgcggctatcaaagccgcattggcggaagaagacagcattatgttggataggttcaagcatgaatctgccgagcctgccatttcaggatcgacagtggcattgtgttgcattaatctcaccaagggcgagctggtcgtctccaatctgggcgattcgcatgttatcctggccgagcgggaccggaaaacagagcacccgtatcacatcgtgcgcactgtcgtcaactcgaggtggtttgagcgtggatactaacaaccacatactagcgacgtctcacagaggcccacaagccctccgaccccagcgagaagacccgaattgagaaagcaggcgggcaagtcaatgaccgcagcggtacagagcgcattggtgggttgagaaaaagaactggcctccaaattgaatattaactcttgagcgacaggttccttgaacatgtctcgagccctaggcgacctgcagtacaagaatccggtgaataatacctttacggacaactccgtgctggaccccgccgcgtcggctagcagccgaacggagtctcggggcaacttcctatccaatgacccctacatctcgcgacggacactgaacccagaccgccgttacctgctcctagtggtgtccgacggagttactgatcgattggacgacacaagcctggttcagcacgtgatgaagttgtcgatgcggggaaaacgagcgaatgagattgcacaagaaatcgccaccaatagtgcgaacaagcctcacagtgacaatgcaacgtgtattgtagcgatgctggatggaagggtatcgtgagatgtagaatattacctcaatgccacaagatatactccgtacttatagtcctagagtagttagccgagttgggcaaagttccacccggaaaatgttatgcagctgtgccactcatggcctaccaacggttcgcgccttccccaatgaagaaggtggtttggactattttggaattttggaatattattatttcctcatattaaaatctttcgactatttcttcttttcgattgttcctccgagactggggggaaagaaaaaaaaagaaaaaaaatgtatgcaaatcaatcgtggcgtatttagacggagaacccttggtggaatctacaaactcgaaggaaaacttggcttctccgcggcttccaagggttttgtactttcgtcccattaaatgatgcaatttgaattttatattgtataaactgaatctagaaccgcagtgcatatgcaccctctgcactccgtatcaaatgctacaatcggatcctccgtaacctcccccgccttccaagggtgccttatcgcttactgtcggtccctgttttatccaaccagacctcgggatccttcgtacaccaatggagctaccgttgaaagcagaggctccgacatgggggggcaggaccggtctgttggaaacctgtcaaaccactttaggcaggcgactcagtctcggggtggagctggcaaaaagaagcataagatccggctgtagccaccttccagaacggtcattcctgaagaggatctcccgagctcgttacatacaaatcgcccgtctatcccacgggttttccttcttcccattcaagtcagatttttccatttctgttgcgttcaggactatctttccatatattggatctctttgatcctgacagcaaccctcaaacatccgacatggcacccaaagaatggagcaacttccatgtgggaagagaatgtggccacctcaagtggtcccgtcgaaacgtccccaagttcaccatctcctccggtgagactgtctctttcgatgccatcgacagtagcaatggccaactcaacacatcatccgaggcctcagccatcaagacgttggatctcggcctggccaatcctgtcttcggcccgatctatatgaacgacgcccaacccggcgatgtcctcaaggtggaagtcctagaccttgaggttgctgactggggctggtccgccatcatcccgggcttcggtctgctggcagacgaattcccagagccagagatcaagatctgggagctgaaccgcgaagcaggcttcgcccaattcaaacacatgcggatccccctgcgtcctttcctcggttgcatgggtctcgccccggccaacgacgaagaactctcgaccgtgccgcccacaaacgccggcggaaacatggactgccgagagctcagcgtcggctctaccgtcttcctccccgtccaaaccgccggcgccctcttcagctgcggtgacggtcacgctgcacagggccacggcgaggtctgcggcaccgccatcgaaaccccgatccgcgctaccctccgcttcgaactcctcaagaaccaaccctggatgactgctccccagttccagactccccctcgtgcccaaataccgaaccctcttcccgaccttggaacctatggtgctctcggtattgctcctgacctatacgaggctaccagaagtgctactcggagtcttatacaatggttggtgcagactaagggtctcactcgcagcgaggcatacatcattgctagtgttgctggtgacttgcatattgctgaagtggttaacgtgcccaactttgaggtggccatgaccctgcccttgggtatcttctcttgattttattgtcgttctttttcgaaatccttgattagtctcaaggcatatgttgacgtgataccctcctgagaatatttgtgatttcatttcggttgggcatatactggtgtgattggggtgatgtatttgcatgattcagacaagcgttactcaagcgagcattatattccgaatacggagtcttcttttgatcgagaaatagctattccatccgtatgtgccgttgcattggcacagtgccttttctatcctgggcctcttaactcgaagggcttgattctggaatcctcattgaacaaagtgatgtcctacagactgtaacgaggtccacctaaaggggaatattccgcttgatcccgggataacccttgatacgaatccaccaggatgtgggtactgcttcttaggcgtcgtgtactctgtcgtgacggtcccaaaatattaaaccagtggggtccggacatgtgtggatagccaaattggcccgtgcatcgatttatattgtctgtcatgtctgctgttagacactctggatgctaagctttgcgtgctattccaatattccgagtgtttgtccggcactagcttataagtagcaattcctccgtctaagtgagtatccgattcatttcatctcggatctcaggggggcacagattgaaattgaaatcagacgacttgcctacgtacctggtatcctctacaacttggtttctctaaccttgtcgacggacatgacgtaacatcgcttgatcttctaatattgtccacgcctcgccggtaacacaccagaaacattggagtcacataggaaagacgtatcggagttttatttttggaactatcttagagggagataaggttctgcaatcggcaggttcggtggacttgatcgagaaatacatccatagtaagaaggttaactagagtcatgcataagatgaatatagacccctagggcctaggcaaataagaattatgctcaagtgataagcgaagggtaaacactaaaacgaaaatggaagcgaagcccagcacaacactttatcggacctgccttttatggactaatggccgcgtctactactatcacccatcccgagaccctctcttccctacggaatacttggccttctggaaacaatgacggcagcgcactcccgaacttcgccacataataatgggccgtgcatccttgaaatggtcaggcatgtcccgcgttgctggagcgcttgtatcagataggcaggtcgggatccggcacggcgggagacatcgggcccactcctgaaggctgaatcaaaatatcgccaacagaagatgggaaggggctttgtgaacgagtcatgcgatgatacatccgaggtacaggaatataactatctcagtctttgtacaaaagtacaaaagtaccaattccacttggttagacttttccgccttggtcaaatgccaatgtgaaatgtattattagttacataatgaccagatggctgacgttaaggtatcatcctatgtgtcaatctggtgaatttgcgtatctcgtgctgttcttagtggcacttggactcgtttatatgccgaacgagtgatttgaagcctcacctgccaatctcggtaatttcatagtggagttaggtagaggggctgtcaggctgaactaaaggggtggtaaaatgaaagccttattcatgtatcaataaatattcccattagcatgaagcttaacatttggaagtgtcgctaaaaactcatgttgattactcttcttatatagtgaaaaaaagtacgaattttgagactcaagagcagcgcctacgcttttgctgcaagaataccatcagcatataccagaagactacgcaagtgaaaagtaggcatagctatgggtaggatgccacaaggttggacataagctccctctattctaaccgcaatcatccactctacagacgtctttggggcttgccgtctcacaactatcccctcaataccatctctagggctcgtatctgaattatcaagttttcacaatcgaagacaggtagttagcaagtactccgtaccaatccattaattcttcaaacagtgtcctcaatgtagagtggaagtgtcacatgacgtcgcgttttctcgcgtctccccctcacaaacacccgaggattggcaaacaccccacatgtcatggatccgattttagacggcttgaatcatgcccagcgggaagccgtcacttcatctggctcaatcctgcaagtgctcgcaccgccgggctcgggtaagacaaaaacattgaccgcacgcgtcgcgtacctcctctcgcaccacggataccaaccgcaagatgttatatgctgcacattcaccatcaaggccagccgtgagatgcgggagcggctcgcaaaactcattggagaaaaactcgaatcgcgcttgattctcggcacctttcattccatctgtcgccgctacttggtcaagtacggatacttgatcggtctgcggaaggggtttggcattgcggattcggatgatacccgcgcaattatcagagtatgagtagtacttttaaattatatcaatttgtttctattctctaattgtcactgcagagaaccattaaacgactgaagtctagcattgaagtcaaggcggcgcaaggccgaatttctcgacataaagcacatggactcagtcctgatgccctggctgacagagccaaagcagaggagttggagcttgttgatatctatcgtgactacgaatcagcgctggccgcctccaatctcttggattatgatgacctccttctgcggtgtggggatctgctccgagaccacccagaatgtgtctcaaatgtgcaggccgtcttggtggatgagttccaggacaccaacatcatacaatatgaactgatgaacctcttcgcatctaagaaccgacggatcaccatcgtcggagatccggatcaaagcatctacgggtttcgttctgcggagatccagaatctcaagcggatgcagcaccgatattcaaacacgacggttgtactgttggaagacaattaccgctctgcaggttctatcttgaatgcagcccaagaagtgattgagcaggatacgagccggcctgcaaaggcattgctagctacgcactccttcggaaccttgcccgtgctaagaagactcccaaatcccaacgcagaggcgcagtggatggtacttgagatcaagcgatgtgcagcgatgaccggcggtctactgcgcatgtctgactttgctgtcctgcttcggtcggcttcgctgtctacacaaatcgaaacagcttttggaagggcgggtataccgtacaagatggttggaggcagaaaattctttgaccgaactgaagtcaagattcttctcaattatatgagggtggtgagccatacgggacattcggacgcgttgatgaatattgtgaatgttccgccacgaagaattggcgatgagacaatcaagcaattgactagcggtgcggagaaggccaaaattcctctatgggacttcatcaaggatgtcatccaagggcgtcgttcgactgagaagaaactacaaaaagctgcagagcagggactctgcgttctaatcaatttgattgaagcctctagacagaagttgcaagagtgcgaggatgcatccgctccacgtgttctgattgagttcattgccgaacgcctctcattccaagaatatctcatcagagcatatcccctagacgaagacagtcgctgggcgaatgttaaagaattgatgcatcaagccagtgaagtcgcagcattcgaggaggaggttgataaagaaatggatctccctgaaatcgaaggtgtgcaacaacagcaggcacatcctggcgaggaggctctcactcggttcctggcgaatgtcgccttggctacggagatcacaaccaaagaagaagccaaagagggaaaccaaccgcaagagaaagtcacgatttcaactatccacgctgctaagggcctggagtggccagtcgtatttgttcctgcagtgtacaacgggagcattcctcactcgcgtgctgaggtaatagaagaagagagacgattgctgtatgtcgcgatgacaagagcgcaggccctgttatacctgagtgttcctattcgacaaccgcggttaggagaaggagaagctggtgccaccactttgacgccattccttcctcccaaattgaccaaatcgcgcttccggtcaacggggccgtctctccatgagaaggtggtgtatgcaattgccgatattctgcgtcgcccgcggccatctttagacgacatttacaaggggctcgagtttcttccatcgacgctggacgaccgatggacacccgagggcgaggaggaccgcagcaaattcgatggcacatctacctctcacgacgcgtctggcgagcccaatccaaagcgtcggcgggcagacatgaaccagggtccaaaatcgaccacctacatctcatcgaccgggtataccatgaacaactcgacagggtttacgattcctacaactggtctatcgggttttacgtctgcccgggattacatagcggccaaccccgaaccccccgcggagtcagcctcaaaggctgatgcagatgcagatgcagctgggacaaatagaccgaaaccgctcagcagcgcaagccgtaaagacggactcacacaggcaagcatatccaacttttttgcaggcccaggatcctcccagaagagggaaccagttctgcctcgctatccacagccaccaccgcagaaccaacgctcaggggcaagaagcattgtcccatctaccctctcctctcaccgtgttcagccacgaccacttattccaacaaggccgaccctggagcccacggaccccaatggttacacgtggctggcaactccatccaacccaacaaccctgaaagctgccaggatgtcgaagatgcaggaacagaacggcaatagtacatccgcaggcggaacagccggggcagacgaggtgaaacccgagagctccaccgggttccagccggtgtcgacgtttcacagcacgacgatgtcaatgatccaacaagcaccgcgacggacgttgggaattcggcggagcatgaacgggtggcaagaccggatgaagcgcgagggcggtggacaggcgagctgacacgatttacgatttcaggggaggctggttctagaatcctgacggggatgggttatgtttgtccacgggaccaggtcagaagggcagaaggggtcaggcaatccacacgcttcgcaagcccattgccggttcaggcgttgctagggaagccctcccggggtatacttagcttggaaagtgattgaccaggaaagggttgactccagggccagaatctcggtctagatggaatgacgcacatccgtgcactaccaactagaccatgacctgtttatgcattgctctatagggagatgtatatgtacctaagtttcataattattattttccccatgggatgacccctgtatgaactggggcgggcagatcttccgatggagcctaatacagattagccaggctgaggattatggacaaggaacagagtgtcgatttgcatacacaatgatcgagacgtaagattctggaccatagtggggttccaattacggtgaaagaatcaatagttagccagtagcatgtcgtacaacatagtatgatactatatacacgcactctgtacagccgccattgacgcatcctagcggtgtgggaagcgaggaatcccctcaacgtaacgatttattattatttggttagttatttgctattttagttacacgaccagtccgattctgtaaataggacgaagaatggctgactcatcattattggaaatagtaccggcacaaagccctagcaacttctctccttcatcactggctgccctactttcgatcgaccctctaggccaatcaatgcttcgatcgtggcagccattaccaggcaccaaatacgtcagggggagatgatccattcctagctcttgtcctcttttgggactagtgagctgctcgacgtatgttccccagagtgtagatcggggcgaagctcaatgcggaatggcttgctatacaaaaagaagtcgtcgccctcgaactatcacttcattatcaaccaaactacagcatatcaacaacatcactattgtcttctcttatatttttgtcttcctttataccttttatctataccttttgtctatatcttaattattgtccttataatctcagttcaacactgtgcctcacgctcgacgcgttctatacatatccgttcatctcttgatctttttacctttttactctctctctttgctctctacggagtacctctacctcttttaataccctaatatccctcttcctcgccatacgccttcatctttacctcctccaccctcaaactacatacaaaccattcctaccattcctccacaatgccacacaaagtgaacgactccaattcaacactagccagcagaggcagcaacaatgatcaggtggtggccaccgaagtccggagtatgtcaagtgcatcacatccctgtcccgatctccagattcagcccgagctaatgcagaccccagcaaccaatcccgtccgcaaacctccggtgatcgttcacaacaagggcggccgaatctacgatgagacgcggccatctgactgggacaaacaacgctggaagtagttgtcctttacagttcgaattgcctacgtccctatgcatctcaattgctacatctgcatacggggcgttcggctggagagcgagacgcgaataccaccattttacacgcgcgttacaaaggcgaaaagggggtccagactaggagaagagacgaaaaagcccagaaaaaaaggaagaaaagtgaggcggtgatcgaccaagatggttcgcggagatcattggacgccaaaacccccttttttcgctgcctctcgtcaccgcttgacgctttctctttcgcccctgaccagatcgggctgcttctacttttcggattcctcggattctcagggctttggtgccgtttcttcccttttttgacttgtccatttgcctctccccggatttttcgcgtctccactcttccccttgtatcattattctggagttcgtcttccttcattcctctactctctactccccttcccccttctactttctacattctacccttccaactctactggttactgttgaacacgtgttttcctctcggcgctgccaccaagcagctagctgcatggtcatgctgtgagggctaattgggttgacacccttctatttgtttcttttgtttcttgcgatgcatagcgtgggtattactggatctgctggacttggatttattgcgaatgagcgaaattgtattcttaagaggaatttgactgtcttattatctagatcttccctttatttgtgcttctttcacggagtactccataccgtaaacacggtgaacgctggccagaaacggccgctttgacatcgtattaggccgccgtcgtcggtctggcgtcaagtttagcaattaacacggctgccctggttaaatgcctcgtgttggccgtgcctccagggttgtatatacagttatccgactcttcttcaattctactggaagagggaaagagcgatgggaatacaatggggctcgaggaaacgaaccttccctgggagtttctttaaatcaggtaggaacgatgcacttccattgctttcctttgtccatgtgatctatcatatgcagtcacacgcatgtaggtctcgtcttctgacgacctatgcgatatttaatatgtggcattgattcatccgcaatacacccaccccctcgaatagaaagtcgatgctatcaaataaccaccttccattatcatccaaagatcccatagcatgtgtccaacatttcatccattcgaaattagttcgaattgtcacgtccgcccgatgcctgaaaatgagcacgagtcgtatcgatagacgccctgtcaaattgcggatcttctacgatggtagaccggtgtttggtgcaaagtgcgctagcatttcctatatgtgactgggcatacggagtactgtctcagaaattgccgtttgatgcaggcctcggtgtgtctaacagcgcctagaaatgaagcatcgaattcgggagagtaggtggtgcgatagatggcatgtcctcagctccacaaaccgtacattctattactgagctcctccataattgcggtggatgattgtaggtggaatgtggtagggttcaaccagcttcaccaacagccgcttccttatctccggctaacaccgaacgacttgaatattattcctagacccgagcgcttttggaataaagcatcaattttcaatcttattttaacaatgtctaatagactttcagatatttatagtcttcgttgtaaaaaaaaaagtggtcaatataatatatacagggcttcgatgacagtaaaatatatatatgagaccttgtccgagtggctggatatacattttgagacactagagctattggtggaaagtatctgggtatatgccactggcaggatatacttttattgtgaaaggcaatggatatgggactgaatttcagacaagagcagcgcagagagtgacatgccgttgacataggtacggagtagaaatatggctaccatgcagtagctcgcagaaaatcccaaaggagagcacaatacggagtaccctacaagaacaaataaagactacaatttaaagcatccaaaagttcactgaaaatgggatatatttcagcgccgagcggtataccgacaccccattctcaaattcacataagaaatgaaagaaaaaggcacctggcctgccgcctcccgtgatggatgacggacaggcgttcagggcatgtgtcaaaggctagatacaaaggaaggggagagcgagggaaaagaaaaggcatccgttgattccaaatatggactcggacacccttcctccccagaagacatataattttttccgggttttcacactttttttgcttttttttgtgacctccatgagaaacgaggcacattaaaaacgggtttgagggggggttttgaggggcggggattgggtgttgggggcgcaattgggaaggcagtcaagctgctaaggattgtggagcgcagggggaatggggatatcaaaaacgcagcaccaattggcgcgcagaaatacaaagggtcaaggtgtgcatggtattccttgacagagaagagaagttaatatgacgaggggagtgaaaaacatcaaactgtattcttgaaaaacaaataaatcaacatggctcgcgctcgcaatgctagatggtaagtcaagtgcaacggatgacccaaaactaatgggtatgggagcaaatgggtatgcaatttttggaacaggaagtgaagggctggtctcgactctggttccgcagaannnnnnnnnnnnnnnnnnnnnnnnnnnnnnnnnnnnnnnnnnnnnnnnnnnnnnnnnnnnnnnnnnnnnnnnnnnnnnnnnnnnnnnnnnnnnnnnnnnnnnnnnnnnnnnnnnnnnnnnnnnnnnnnnnnnnnnnnnnnnnnnnnnnnnnnnnnnnnnnnnnnnnnnnnnnnnnnnnnnnnnnnnnnnnnnnnnnnnnnnnnnnnnnnnnnnnnnnnnnnnnnnnnnnntcggaggccgaatgcaaagcgtaaaggacgaaagtggacatagtcgagttcgggggatatagcacaggtgaacagctggtatggcgcattgagtattaagatggaatatcgaggtagatcaatgcgcaatcggacgctccttggaggcattctatgaagatgagagaaatgaaatgaaatgctggaaatatgtgcaacggccaaatttcatttggtttgctggtcgttccgtcgtttcgtttacatcccaccctgatatgtctggcacattcccatatgggtaggtgccagagggaactgttggagtgctgcttgctgcgccatgtacatagcctcctgctgttgctggtatgcttcactgttcatgtattgcatctcagcggatggtgcgggggaaggggaacagccatggtgaccagtggccattccgcggctcatatcgtgattcgccatttgtgcatgggcatgcacaagcgcctcgttgtccggggtgatgggaggagtgaggtaaccgtgaggaatagctgtcaactgctgggacttctgaggggtggcaaggccaatctccccattgtacggcttggactcgataggagtctcgaccggaggggtgcaacgggcgtaggttgccaacgaagcctggcggttgaggaagtgttccatgaccttggagacccgagagtagtgagcggaagcgtacttgcgggcgaccacggtggagggctggtgcaactgttgagacaaggcaacgagagtcatcgagtcatactgcgatgaccaatgggtatgacggggctgaggccggttaagaatgcaacgtgacaatgcaagagcggcacgggcaagctcagacgatagcttggcgacaaagtcccggtggaacaaggcaatctccaggatgtacagagccatgtgttccacctcggggtcgtaagcatcatccaagacggcgtgctgcaagaaagcatccacagttgggtgtccaatggaccagccaagagtttggaggacatgccattccatctgggtgaacatatcgtcgtcgtaaagagagcagcacatcgacttcaactccttgatagtggggacgcgatccttcttgtcattgtacttggccgcgatgagtagagctgcacagccgaccaactggtagtgacgcttgtagaccacacgcttggagcagtatcggtctaaaagattgattgccaagaacaaggtggatgggaggagctggaacgcagtgtgggcctcgatcaagaagtcaagaaggtacggtcgcataaaccactggatctcggtttggatgtcaatggactcgacgtcgggcagggtttggttctatggcggagactaggttaacaacgtatagccttggagagaaaccaagggtctggtcactcacatccatttccaacatgtgactcaggacatcgtcccgaagctgctcgcttgtgagattagatagctcatccgccatgacgtattgacgctcacgagccatctgcttggcatgctcctgtttcgcttgccgttcttgccgaatgcgactttccatgccgtactcttcttccacgaagaacgtgggacaaggacggtagttgcgatggtaatccatgattgcggaagtacttggatcaaccgaagtatgaagcacaagttgacgtatgagctttgtattggcgagtttcaacgaaaggaagcctgaagaacgggtctatcaggcaacgacggaattaagagagtgacagtcgtgtattagtgtattggaatgaatgacggagatgttgtaacgattaatgaatggaccagctgaaacaatagttcgaactgggaaaggttggccgggaggtccgaggaggatgtcttcgaagggaaggctgaaggaaattaagattagcggaggccaatgtaagaaatcgattaaaagattgtaacgtcaaggtgacaaaagtaagagagtgtggaaaggaaaagcacaagaaggcagagtgcagagatgtatgctaatatccattcaggagacgaaaagggtcatccttctgagaaatactaacccagaaaagagccttcgggtagagggcacaatgcaacccttaccgtgacggcaagactggcatctaggcaggaatgatccggtgaattaggattctgttggataccaacgaagagatggagtacgagtcaacgtcttcacccctaggctagtgatgtggaatgtggagtaggagaacaaccctatgaagggggtcataatcatcagggggatgtcttggcaaaggaatggttagaactcacacttcacagattaacgagttgaatgaacaaggctcagtgaagagactgatatagtttctgagatggaagtggtgaaggatgaagtccacgtcaagagagacaagtggatttatatcaaatatgaagatgaacaaattctagatcaggcaacaatgtcagtcatattcattaatagttccatcgtgatagtcaaggctccaaagagcaatggcaatcaacgattgacgccaatcaacaattaagtgcaatgaggtatgtggtgccgcagcctgatcggcgccccaacatgcggtatgtccagtaagagtacgggattttcatcgaccccttaaacttcccacgccgggagatatagaagcagccacaagcgctggttggaccctgagattgcatgtcaagcattaagatatgcattcctcagttgtatctgagggcatgatctcccgtctgcatggacggcaatctttaccgctcaataaagagcaacccctccatatctggctctcggtgtgttgtctcgggtgggaaatgcaaaattggaggtaaatgaggttggggctgctggattgaacatggccctgaggccataccatgattatgttggtgggtcgatttttcatgcactcattggaagggttttttttttcgtgtggaaatttattgaatctcatggctcatgttgagaaaattcgagtatccgttgctcgtctatccatcggggcgttccgatcttgacaaccatgcacacctcaaagtaccaagaaaaaaacaggatttcttacccaagttttgaacgtcaatgtctgtctgatacccaaaaccaatttgtatcaaccaaaagtcaacctgaatgtgtttttcctacactgtcgctcgtctaaccggcaggagctggaacaggagggtccaaaaagtccgaggatcagggagggcaccgggcggacaagaacgaaggatcgccgtttgagttaacaaacgtcgaattggagggtcaagtgcgaaggtcaaatcgacttgacttgagtgctagtgcagcgggctggaggagatcgactggaatgtcgaaccgtaactcagccagtagaccagactcgtggtctccgcaagattggcaaggaggaaaagggggaagagaaaagggtatgaagaagagaaggagagaggtacaaggaggaggattttgactttctctctccaggcgggtggtgggaagagaaagaaggaaaaggaagaggttaagaagctgagaagacacggagatacacacggagagagctggttgtatggtaatccacgagacagagagtggaggctgaaggttgcgtacggtaaccgtatgatttccagaatcttaccgattgtacctctggtacccagcatgtatgccaggggaccggtaattttgataactagggcttcgtctctgcaaggacaggagttgaaacctacttgcttgaaaccggcagttacatatgtgttattttaaaaggtcggaggtttcaaacgtggaacaggcacaggtacagtatgcaagtgttgaagtagctacagtaaaatagcaaaatagcaaaatagcaaaatagcaaaatagcaaaatagtaaacagaaattactcgatagtattcatacctacaagcaatctcaaatgcgatgtatctacgaggttgcatatgctataactttgaaactcgaatattgcgttttcaaccgtatgccgcgacccagtcattttcctagactagtaatttgaaggacttctgatctccgacatttcgacatttcaactctcaactgaaccttcaacctttcacccatttcaaagcctaccatttccccgtaaatcgcctttgatcatagtacaatctccaattctccgaaattcaaccaccgcgtttccctatttctgatcagacaaataaagaaaaagtataaatggagccaagacaaccgcgagttccggccccaaaaaagctcctgatcgacaagtattaaggccaatcctcaaccattgttggctcgtcatccagcaccttggttactagtgctgcaatgggctggtgtggctctccctctaactccgtacgaggcctccgatacggtcgcgcgttctagggtctcctgcgcctgggcgttgactggtccagaagcctgggattgccctgttgacttcatttgggcttttccccattcgcgtacctcagcttgggctttcctgaattgataacccgagcctcctttgtcttgcatgaatctgactatcctgcgccgtccatgtggggatatttccaagcttcggttttcggtcgcaaaagcaggatctcgcccgtaatttggacctccacgtttccatttctttttcttgctggaattggtttaattaatctgactgtcactatgtatatagttcactaactgttttagacactgcgcatgtaatttactttctcgtatacagtatcactttacaccttcatccctacaacgtctgccgcctgtgacaccactggagatgcacttgattcgtccccaacttctcgacccgagataaggttcatagacgtctcatcaagattgactggtttagtcttgagaatgtcactttttactggacgcgtatattccccatgtcgatctgcgaatcaatccctggtactaaagtacacaattgcgactcggagctttttacttatctccccttacttcatccccttacaatgcacaatttgaatgagaaccctctgtaaggtccagggattaagctcagccactcaattgcatatcagaaatatcgatcatcatgcgactcggccgtttctcaatgacatgcacaggatgcgtacacaccaagtgactggatacgatcggtctatactattccggagcacggagtaaatgcagcttgatatacgacagcgcataaggctttacatctagcacggggtagtggatccatacgtttcacttgctcaacttcaaggaatgcgggttgaatcattggttagcgccttttcattcaaactggaaaacagttgccgaagcaatgggctatcgacggggtatttccacctcgtgcaaactaacagggaaacgaagggggaaaagataagcgatggccattgaagggtgctgtcgagagtcgggactgtacaacgtcgtaaggcaagggactgtcaaataagagaactgaatgatagacatggctgatatgcagaagcagatcacaaacacccttctacaaatttaggttcgtgttataaactcccatctcatagcatgccagggacttttgttgtcgcgccatagcagcagttaaatgaatcgccgaggctttgattggaataatatgtactctagataattgaacagagtacctcttcatccttgataacctgtcagctgcagaggaacacgcctagccttcatacttgcctcggtgagtctggcccgtatgttgcgtcaatcaaagacacccatatccaaacactctcattttaggctaaggtactccgggattccacttgatctgcatatatgatccatgccagtggatagcattatatacctaattatatacttctgttgcttgagtagttcgccccaaatggcggggatgacctgtactacccggtagatggtaataatatcaaaggacattattgggtgtaccacctgaacacaaacctgatacccgtactccgtatagcctcctaaatcctcgcagcaaggcaaacttgaagaaacaattggactaaacacgcccttttgtaaagcggtctaagggaaaagggggctcccatgcagcaaatacgtggtcgcaatggggcatatcccactgcagccgcgcacagtctcaggatcaaatcagtaagagatacgagttacttcgtgtccacaaagcttgcccggatggcttggaaactaggtacgacctggccgatgcttccgatgcgcccagccggcacgctactgtacctcctgaaaaggggaagaagagccttgcggtatgtcagcttgccattttcgtcccctgactcgtgtctcgccccatgtttcaagtaccgaccgtaggaagtcctctagaggatgagagtaagtctaaagcgcgcgcatatggcgatggacataatttgagtctggacctgggctgggaattctattggccccggactctttagcttcccgtggcggataagttgcaattttatctatttttgggtatgagtctgaacctcccatttattttagtcttgggcattttgctcgacatagttctttggatagagaattacttgttagaagtgcttgattggattcaaggagtgactgatccttgtttgtgaggtggttggtaaaacctcgctggcaaacacccatgcaagtcaagtcttcaaggaggcgtcacttgtctataaatgagagaaatttaaataacctgccatcgagtggtttactgcaagatctcacccggatgggcgccgaacatgatggtggtttcccttgctcatgactctgcaaatcaagagacagtaatataacccttcgatttccctccacgttgcttatttcacttgcagtccgcgcagtggatatttcattctgtaaggggaagatccttcccagacgtcaagccatctggaaatctgtttccaatgtagatcaatgttctttggcagatgttactcgtttgttcgagggcggtgtggactggatattaggtatctcatcaaatcatgtaccagttgcatgttctgcatcaaatatcatcactggtaactgatatatagggtattcatttccaagtggatattacaagcagtctatacacacaatacaagcgcgatctgattcatacttgatatcccatatcgatacattccatactcccgaggtccgtacagggtatctagagaccaatttccgagacttgcagtagtctagtataatacagcccacagaaaaatctaccaacgaacccggcaaaacgtaagagtggaatccgatcttttttcttcgcctcgcaatcgttccaccctaacctgagaaattaacgcgctccggcatcacacgcctgctaaaccatggaaccatggccaatgcctcggacgcagaacccatggacgtaaccagaactccacgttcaacagcggttattccagggcccgtgccggaatatatcaaccatggtactattgggaaagaacggaatccttaccgctctttgcgtcctgttcaccgtccattgaacattgcaatatggtctcaaagtacgtggtatggagccctagagtacatctgtacaaactcaccgttctcttccgccccgccatgtttgatagttttccgctccaccgtctgcctagatgtgcaaaaacacaggtggcggaattggctgttatcggatagcacggataccgtacggagtacgcacaaagaggttgggattgtggctctattctcggatatgtttctcacgtgtagagcaacgggtacagcgacggggggatttaataatagctaatcattgaataaacttagaatttaacgtacatagtcctatactgttgagattatccattggaattgaactgctagatatccaaatacatccccgaacctcaatttttcccatgcgtattaggccaaaaggctgcattcttgaccggtgaaaaattgacgtttcgtggcccctctgcggggagttatacaaatgccacaaaggtttttctgtgtttagtggaaacagctccactacacgggtttttctttcttcttttcttctttcttattccttaggttggagaagtttctaggtggttgacatggtgcagctcatatggaatactcggaaaccctgaaatgtataaagtatgttgtagtgcctcggatttacgtacccctaatttccgaaatcatctccgcaggatacatgtcgtcattcgcatgtataatcctcactttttcagtgctggcattttcaagacggtgaataattgtccagcatacagaatccttgcaaagctccaccccgaataagccctgaaggacgatgctaattactaacgcggatcggggattcgagacaagattacccttttaggtatggttcaacatacacagcttgactggggcagcggaggctcaacccatggttaggctgtttttttcactcccctattccccgccccttttctttagctttctttcaattcaatttgaaatcgccactgcatatcttatgtggccctcttcatagatagggactgtaggatacctccgaattccccaaattggatcaattgacctatgtactattcgatccggtttttcaagactcctccattccagacaggctgagacagcaaaggtaatcggagctgcaaggctgttcattacgtcgctaaacctgacgcggcttagggcataaaaccgagtggagaatacccgtagtgtaaggaaagaaaaggtccactttgaagctttacaatttcaatgtaccggttactgtacgtacaaaatacaaatgtacctcgaaacctgtccgaaaggggataaattgatttgtacaggatttgttgcctacgggctttgcacggtacgtaactgaatgcgaccgaactttgaacccaaccctaacgaacactcataaatagcatcttgcataagattacgattacacttgtgcgccatgtgtctgagtggcacccggcatagtttagtctatgccatcattgcccggctcacgtcccgcacttcttgctttctgtattgcggttcgctttattgcaatcgaccaaggtttgcaggaagatgtataacatacaaattgcctttccatcaacgcatgtctttgtgatatgtgtccaaaaaagggaatagttgattcccttctacagtgggcctagaacagacatggggttggccgctcggtcaccctctactaaaggcaatttggtttcatcttggcgcgaatcccagcaaactctcgtgtgcatcatcactgattccaaggtcgtgtttatattgccgatccggtatctttgttatccgaggcaaatctgacactggcctagataccctcggtcttaccaggaaagggtccaatggggaaggtgcgatggatgccaaattggagctaatcgtgaactataatatgtgagttcactaagcctatgatctgacctcatcatccccgcagcacgcgattccacgaggctgcgcaattaggggctaccggcttgacaaataatatcatccatgtcgcctatgtacaccatacatcacgtatcgggactgccgaagagttccactgggaccggagtcaaagatcgcggtccatctcagctggatactgtacatgtgtaaacctagcttgcaccgcaccggcctctgtaaatagagacaatcaagcacaagcatagggacaatttaattgagttcgatgaccccggttggcaattccttccaagccaaccacaagcaccggggataaaacagaacaaagcaccgaggacaacatgaacgtgatcatccaaatcaatgaaatgacatgacaagtgtgtgttgtatttcccggatatcaagtgaactatcgaatccatgcgcccgaattgggtccgagcccatgctgacaggggtctccaatatcctgggccgtccccgcagctgttgctgtaacgaagtggaatcccgcgacgcaactcgcacaatcaagactatttcctcggaaatgtttcatgatgacacggaaataccacacacactcgaggttgcataaggcttacaaacgattcgagctgcgccatgagggcccccgcagcagatgtcatacacaggtcgccttatccgcactttgattcgagatcgtccaatgaagacgtgccaattcatctcagcctcccctgttctttagctcgtccatgcccatccagtcatatgttcccattgcgattatatgtgggttgcacactgcagagccaagtaccgtcgcgacctatcagagagtttatctgcaagtgtctcaggagcccgatacatgagcacgcataacaggttactttctcatcagccacaacagactatgtcaagctaaatgatggctgcttctgacgtggcagcccgtcgatggtctccctgccctctgccgaagtaggtcataggaacctgtcgcacccatttgctattgcatgttactattggttgcagactgcggcgcgcgtggcgaacttcgtctactcgcgacatgttcagctgagcctgcattttcagggcagatcctccgctggctcccttacatctggcatggtaatctccatatacattggcctcgatagcacaatacacttcatgcggcccgctgaagtttagaactgggctacagctcggggttttagtttgtactggccgaaacttgctcgggtatccaatggttccgctgcacatttctgagctagactacgacgcgaactcaagttgcttatcggcaattgctccctggtcaatatgtgcatagagggttcagtatttgaccgcttcttatcggttggtcgttgcagttcactcgtctctatctatgatggggagttgcaatagggagctcgaagatatcctacaactttcgtggtgttgcacaaataaaatattactaagactgtttgctggacaagcaaggcacattggatatatagtggttgttgactacatacgttctgaattactcgatcacacttgtgtcaatcctatctcttgtacaaaatttatacatatttcgatgggatctatgtcctgacctgtatctaggtactaacccacctcaggaaacacctgtatttcaattggaaataaagtctactaagagcacatctaatcgatggaacaagttttcactacagagattatcatcgttattgtttgttcttctcatcatgtctccagatactggcccgattcgtaaggcactatatctcaatgacttacttacacgtgatctcgggaaaacctacccaactagtcaagatattccggccgctaaaaattatctacagaaaaaaaaagcggcagcgcaacagtcgcaaggaaagctttggcaccacgctataaccacctatttgtgtttaagagatgactgtctagaggctggttttacagcctgagctgaattattcttgaattgatcttcagcacctccattctgatttgcaccccgttcaaaactatccgaaacgagctctctggcttcgaagcccacatcttcaatcatggatatccaccgctgccgtttcgtttcttacaacccacaggcgatcaatgcacttgcattctcgcaccccccgtcagcagatctagctggacgtggcgtacccaccctccgactcgcgatcggtcgtgcgaacggtgatattgaaatatggaatccgatgcgcggcgcctggttccaggagaccgtgatgcgtggaggcaaggatagaagcattgaaggacttgcgtggacactggatccccaggaggatgggcctgatggcaccaaactaccaggaaagctgcgtctgtttagcattggatattccacggccgtcaccgagtgggatcttgagaatggccgcccgctgcgccactcaagtggaaactacggagagatttggtgtcttgctgcgcagcctcgctggcaggcgactaagggcaaagacgggaaggtggtttctcccgccgagggcgagtacacgggtcagcacctcgccgcaggatgtgcggatgggtcaattgtcatcttgtctactgccgataacgacctcaagttcttgcgcctgatgcgtccttcaacaaaaagagcgcgcgtcctgagcgttaccttccagaaccgcaataccattgtcgcgggttatgctgatagttctatccgtctctttgacattcgcacgggtaagatgctgcggacaatctccctgggcaaaggccccacgggtggcccgaaggaattgttggtttggtcggtcaaatgtctgccggatggcaccatcgtgtccggtgactcggctggtgaaattcggttctgggatgcaaagaactattctctcttccagcggatacagggccatcttgccgatacgcttgatatcgcagtgagtgccaatggagacactgttgtcagcggcggtgccgaccagcgaacggtcgtctaccgcaagaaggagggcgagaagggcgataagaaaggtcgctgggctgagattatgcaccgtcgctaccacacccatgacgttaaggcatttgctgtctatgaaacaaaggatatcagtatcgctgtgtctggaggtatgttgaccttggtccactatgaatttgagaggttcaagcaatgctaacttgtttcgtttaaaggtcccgatgcaacaccaatcattctccctcttcgtgaattcggaaaggaacaccaccgcaagctttcgagtctcccgcaaattcctcagctcacctccgcgccgtcagctcgtttgattatgagtttctgggatagagaagtgagcttgtggcgtgtgtctcgaggccctacgtccttgcatgagaacattgatggtcaacggcataggctcgttggtaaggttctgatacagggcgaggaaaacatctcctcggcgatgctgtcctcggatggcaagacgctcgctgttgcaaccattgccgaggttaaactgttttccctccgtcggagaaagggcgacgagaagggtgctctgcgcatccagaagatcgatgtacccaaggtactttccgatgaaggtgctcgccttgtgaccatttcccccgacggccgatggctttcaatcgttcgccccaacagcgacatctacatggcacggatccagcaaacctccgcatctaatgagaagccccaggtgatgccacagttcgcaaagctcaagagagctgcacgtcatgtacgacacgaaaaggcatcccacggaacattgggcgattacgagagaacgatacgatctgtggtgttttcagacgacagcaaggttctggcgagtggtgatatctctggttgtgtcgatacctgggtactaggcacagcgaccgcacccacgaacggtaccgtcaaacgtagcggggcttcggagtcggacgatgattcatctgatgatgaagacgacgacgacgttgtgattgagggcgagcgctggactaccgctgccactgaatcaccaatccctcgcatgaattccagcataactttgttgtccttccgtcctaagtccgcccccacacaaaagcttctcgccaatggcacgcatcagtctggcgaagatcggctgatggtcctcacaagtgagcaccagctcatcgaatttgatgctcgggatggcaaattgtccgactggtctagacgcaatcccaaggcatacctccccgcagagttccgaggcgttaaggaccgagctatgggctgcatgtgggatctctttgagggccgtgagcgcctctggctctatggagcatcatggctgtggatgtttgatctgctccaagacttcccctcccccgacgaggctgctaagaccgaagagggcaagaccgcaggtcagcttgtcaaggcgtcgaagcgcaagcgcgaagccctcgacgatgacgaggaagagcggaggaaacacaacaccggtgccggtgatcgtattcctcagacacagatggatgtccactttggcaccaaggtccgcaagatcgtcggcagcgatgaatcgcagggagaatggatcaccctggacaaggaacgtccccgcgtgccaggcgaagatgatgaggcctacgagtacgacgagacctttgcagccaccaatgagacaaccctcgccagtttaagacgtggagatgggactgcgatcgaaaccggaactccacaaaagggatcacagaagcacactggcgagaccaagaagcagctggtagaggccaatggtgcctcagctcagcctgcacgtcggtggtggcacacctataagtaccgtgatatcctcggcatcgtacctctcaacaccttgtcggatgacgattccgacgaccagagaccgagtggaactttggaagtcgcagtggtagagcgacctatgtgggacgttgaactgcctggccgctacgtcaaggactacgagtgaagcagagagatgtgaaagggctttctgtaaaaaaaatagaatgcagctgattcagatatgtaatttggtttgagcatacttggggagcgcatgttaccggcgccttatgtacagggattctgaattgatgattaccccaaaaacaatttgcctataactagtggacttgtatattccctgtaatgggatctaaatatctcaagtgaagtacaaaagtcacaaaggaacagaccaacgacgatccagaaccagtgcggggcctttaggcagagtgactttaacctccgaggtcaggctcaactctcacttgacctttaaaacttctgtacaccctgagccagctgatctttctgaaaagcctttgatccgctgccctacttgtctccgtgaatcccgaatctcatcccgatccgcttatcggcttatcgtctacacgtcagctccaaggctgtgaagtccgacgacacatcctcctccttccatagcccgtctgcaagggccagggatacttctatcatatatcgagaaaccctacatttgccagaacataaacgctcgaaagattcattaaggaggtcaacagcaggactgcagcataggtccttccaagtcgaagtcagggcggggccaactactgcatacattcgaagaaagcaggcaatcacgccaccccttttcaataaacggacttcctctatattcaagtgttctctgctgcttcgaactcacctctcaggccctcgactccgatctccgatccctacagaaacgcatcccacgcctgtccggcaataaccgcataactacagccatgggtctctcatacaacgtctacttgactgccaataaaatctttggatgtaagggatgcaagactcatcttgcagatttcaatgatattatgagtcgggtatgagaattcctcgaatcctatacacttccctactatgaataacctgttactaacccatgcctttcgactccctagaactttcgaggccagcacggaaaagcatacctcttcaataaagtcgtcaacgtcacacaaggcgaacctgtagagcgcaacatgacgacaggtcgacatctcgtgcgcgacatcgcctgcagacagtgcaaggaaacggtaggctggaagtacgacaaggcatacgagagcagcgagaaatacaaggagggcaagttcattctcgaggaggagctattctgtgtcgtctgttgatgggtgtgagactttccacctatcttcatgtgtgtcgaccttgatcttcgattcctgcacctgacaggccggctggtggttttatgataagaatgggattgcattctgtgagcatttcttgtatttttgttctttgaagactgattcttgcgacttgttttggtctatctttctcagctttggtgtttccgaaaggcgttgcgaggagtatttgcttttcttcattcggtttctttgggcccgatgaaattggaactagctgcacacttgcagagcaggacttgcatgtcacgtcggcctttctgatacgtcctttgaatacagtttgacggtttatctctctcccgcgtagcatcaaccatctttcggagtatatagtctgcttggaatggtagctataattccgttgtatccacaaatccgtacaacatactcctatgagaagaggagccagctccatctatatcccattttggcattttcagtggagatcaaccactgtagtgtatcagccccaccaggtgattcgcacagaagcccgaaactggagaaattagtccatagatttctttttaactcattcggatccgtctgcaatctgatcgttcgatgttgaagaaatttgacttggaaaatatccactattattacagctgactgtgaattccgccaccaaattccaaagtaggttgctgctctcatacttcgatcctctgtgaaagattgagatctgactattgttagaatgactcctgctccctcggattctggtatgatgcaggcggtcgtgtttcacgggccctacaaggtcgccgttgagcagaggcctattcccaaggttcaggacccggaggatgttatagtcaaggttggatatactgcgctttgtggaaggtgggattgatctatacttttcttgcgaaaaggcccatgctaattttcgtaatattctacagtgagctgcacatgttccgtggcgtggagcctgcaggaaaagatttcataatgggacatgaatttgtcggtaccattgtggaaatgggcagcgctgtcaagactctacagaagggtgaccgggttgtgactgcattcactacttcctggtaggttgtatgctcattatatgctggttctatattgcaattgtacgaatgttgcgctgacaccatgatagtggcgaatgcttctactgcaagcaagggtggtcttctcgctgtgataagaacggtctttttggatgtgacagcttggacggtggacaggccgaatacgtgagtttctaagcatgttatagctttgctctatatgctgatattaacaggcccgcatcccgaatgcggaaggttccgtcatgaaggcccccgagggcgttgacgagaaatatctggtgctcatgggagatattttccccacgggctggtttgcagcaaacaatgcattcaagaactcaaccccgcagcaaattgctgaacagacagtagtcctaattggatgtgggcctgtcggtctctgtgcgctcatcaatgctctggagtacaagcccaagcatattctggcggttgactcggttccgtcgagactggagcttgccaagtcgcttggtgccgagccgtggaacttccagctggaccgggctggtctagacaagcgtgttcaggagttgacaaatggacgtggtgccgatgccgtcattgaagtcgtcgggttgagccctgcattgcgcactggctttgaactgttgcggccttggggaactattagtagtgtgggtgtccacaatggagaggtaagtaggtctgtattggttctagtgttattgctaatgaacgcagatcccgtgggacggcaatgatgcctattccaagaacctcactgtccagatggggcgatgccctgttcggtctgttgctcctcgggctcttgaggtgctcaagaggaaccaacataagcttgggtgagtccatggtatagttatatgactgatatattggtgctgacaaagaacttttagcttcatgacagataagatcatgccgctctcgcaggcagtggagggctataagctatttgaagcgcaccaggtgcagaaagtgatattccaggctgataagtagagaagatgtagacagaaccaggtaatatagaatagaaagaagagtagaatatagaaagatgaagctgaagtcccccaaaaaaaaaaaggcagattttcatactcgggttctctccgcttaaagcaaaacaccaccactccaacttcttcaactctttcacatctccatcttcctcaccttcgtcccttttcttcttcctctcctcttctccttctcctcttctccctttctcccatcgactgcttttcctgttcaccttcttctccccctctcttgatccgagattctgccgctttcccctcccatccatttctccacttcctatctccctcttctgtgagtcctcactctttctagcagttggatcctattcacggactccctcacctgagaatttgcgcatagctacatatggcatgcgcacttctctttgtctcaattaccaaactgactttgccactatttgggtgtgaagtctctaccgtcccgcgaccgtacggtcttcaagaaaccttctatcccgccattcacttgaccttttcaaatcgctcaatcgctcctcctacctccatcgattatcgataaaaatggattccactgagattcaccaaactactgtcgtggacgagcccatgaccgataacttcaacgacaacctcgctgagcagggtgacctagaggcccccctcaagaccgaggaggagtatgctatcgctgagctgactctgcgtgctattgtctcctccaaggaggccggtgttatcatcggcaaggctggtaagaacgttgccgacctccgcgatgagactggtgtcaaagccggtgtgagcaaggtagttcccggtgtccatgaccgtgtcctgaccattactggtcaattgcgctcgcttgctcgcgcctatgcgatcgtggccaagggtcttttggagggtgccccgcagatgggcatgggtggtattgtctctaacaatgggacccaccgtaagtgatatcttttttttattgcccctcaatattttggacttggactggttatgctgttcggggaattaaagcaacccatacagagagtctggaaatccccattttgatctgagcttgttctaactctctccagccgttcgccttctaatctcccacaaccaaatgggtaccatcattggacgacagggcctgaagatcaagcacattcaggatgcatcgggtgttcgtatggtcgcgcaaaaggaaatgcttccccaatccacagagcgcattgtcgaggtccagggtacccccgagggcatcgagaaggctatctgggaaatcggcaaatgtctgcttgacgactggcagcgtggcaccggcactgttctctacaaccccgccgtgcgtgcttccctcagcgcctcgcagccactcaacaacaacccccctgctggaaatggctaccagggcaacaacaacaacagccgccagtacaaccgcaccggcaacggcgccgacttcagcgatggtggctataaccgccgatccaactcggatgctggaaaccgcggctaccccctagttacggaagatggcgaagagatccagacccagaacatcagcattcccgcggacatggttggatgcatcatcggccggggcggaaccaagatcacagagattcgccgaagctctggcgctcggatttcgatcgccaaggctcctcatgacgagaccggcgagcgcatgttcaccatcatgggaagtgctcaggccaatgaaaaggccctataccttctatacgagaacctggaagccgagaagactcgccgcagccagcttccccaggagtaaatcctgcgggatcatctctggtgttttgtgtgcggatgagacggtcctagcaggactcctttgtgttctctgaccttacgacttccttgaagacttgtcggtcacgatcagcggcggtcatgtgctagcgcttcttttatttcttttttattttctatttcattccaattgcttttctctgttgatcttcttcctcggctatcttttgaggttctagcctcgtcacacgtcgctttattcacaaaaaagacaaaagttcactgcgatggatggagggaatacatgcgtattagataccaagtttgtgtggtctttatcgaccattgtgcgttgaattgcatcgcgacccggctgtctctcgatcctatctctcaactttgtcaattacaacagcctcacacctccattccctccctcgcttcccccattcagctgaactgtcaccgcgatgtccctaatctctctttacaccttaccccgactcctgaaccacagacctctccgccactatcccggtccctacctccaccttgtccttctcatcgttccgccttgtacgtcgccaattcgctggcggggtatattgatccttgtctttcctctactcttatctcctcgacttctgtaccctgttctcgttcccttcctatccctgacttactgcaatgctaccaccttttaccaaccctcgaaaacgaaacctctaaataataaaaaaacgctcctcgtctcctaattacccttctttcatgtgcctcctcgctgcgtaccaccttggctcaagtatgaatatatggtgttgaatgtcaataggacattgccattatctgaatctcaagaaatatccagaaagacacctatatcctcctacattgtattatatttagaaagcaatagaattaatcaaaaagctcttgaatatcatttcattccattcaatcgttatgtaaatgttcgttgcgactcaggacaacaaaagaaacaagagaaaagacctgcgggcaacagacttagatacaaaaacgtgcccgcaagaaatgagagacgtgacaaaagaataaacagggaaaagaaaaagaaaaacaaggaacggtaaaccctagcgtgggatacacacatggaacagtgtgccacccggtagagtattatggacaagagacgccgccaatggtaggtttgtacatgaaatggcaagccaccggtagacatgatgatagtccacggtggtgagatggtgtttttgctgtcaggggtatttcccgcagacaaagatcacacagagaaatgtggacatttaatagaatgtgtaatgtgctggcagcgtgatgggaaaatacagaggagattcgtgggaatgcatagcgaaattttgtgaaccgtgcataggagggaaaacttcgaactgccgtggctgctgagacatgcataacaggcaaagtccgttcaaaagatggaatgaatgccgatgtcgaagcatatgtccaaagaaactcgctgcgtaagtgacgtaaccggatattttgacggttggcatgcatgatagtggggttcagccagaggatatcagagatttggacgttaatcgatgctgtcatcgaggtttgcattattgggggtagccggagcacgatttcgaagaccgaatcttcgggcccccaagctgttcgttcgcagtcgtggtgtttggattggtgtgtagctggttgccactttgcttgatggggtcgaaatcctggtctgggagggttccatttggagtgatcgcggactctcttcggctgaagatccctggacgttattggaagagaagctgggcgttaggccgtaacggcgagacccagcctggatgttggagcgggatatcgcaggagtgtacgtagcagggttcatgtagcttcggcggaatgagaaactcgacgagagagtcggtgtccgaggctgggatgactgcacctgcggctgggggaggtgggatggttgttggtattggtgtgatggttggtattgtggggagcgaggggagtatccgaagccgttatgttcctgctgcgcaccggaaatggagcgggacacagtgtgaccttgggagaatcgttgccgaggagggggtatggcttgcgcaggaagcgatgtgcgtatttctgtattgactctggaactcgaacgactatgtgaacttccggtctctccgttctcctcgccaatggtcagcctgcggctgcggagggaacttggcatgcgattgagacgactggctgggctagacatgccgggagattgtgttggactctgcttgatatcgttcgtgtttccagggctggcattgaccacggatgatcgacgtgcttcaaggcgactggacatgcgattcgtactatggcgccgctcaactccttcaggctcttggttcccgtttcgctgatacgttggtatggacatacgagcatcggctcctgcaccattcgataattggggctgcacgactgtctctcggctcgaggacggtcgggcactctttaactgctcatctgtcaaggctagacagagctcggtcaggctacggcatacactgtccgctttgcggcgggcatgtcgttcgggcgaggagtatcctccattcacaacagagacactgcctgacggagaggtattgacgcctaacgcggtggagaggttcaaagcatcggttatcgtcgcttcgaggcaggtgtacacttcaccgctcaaaacagcttttgccttggccaatgcggattgcaggatcggatgcgccgggttatgttcaatatctgcagctgagatgctggttttgcggcgttgcttcggtgaggaggataaggtggtaatggtagtgtttgcagtccgcggtctctcgttcgtaggggtgtacatcgccgccgaagatgatgcgggcagtttgcctgtcagttccagcttcttgatgcgatctttcagatcatccaattcgtcccagacggtcgatggggccgtgatggacaacgtcgactcgcttccatcagcgcgcgatcgttctgtatcggctcgcggtcgcccgatcacttcggagtttgaagtttgccggctgcttcggattgtagagagccccgaatggcgattgatgcgcggatcattgagagaggaccgacgctccagctcctcagcagcagacggtgtgcgcggtgaagtttctgggctcgtgcggctgaagcggctgcgcggaacaccgacggcggatcgcgcactggatagggtactgtatcggaagcgagctgggtcgtctagaggatgggcggatgacgctagagtatgggtggcgctgtagggggcagtaggggaatcattctggaaatgcaaggggttgtcgagattgctataccgctgatcgggtgagggggtttgttctgttggcgaccgtagactttggctagaataacccagccgtgactattatgttctcgttagccatcgggcagtcgcaagaaggggtcacgcggatagcacaaaagcgattcggaatgcgatcggctcaagacctgtttccttctcacttacccgtctgaaatctgagcgtcctatggagtcgcgccgaccggaatcggttctcgcaatattcagaaacacatcctcgttctttgggcggccctcgtcccccgaggacttgtcctcggccccccgatgagtaccgttgagactgccattgtgagagcgattattctcatttagggttctggtcgctccagaataagccagacttgatggcattgctcttttcacatcagggcgatcttggtgtaattcgtcctgtctgcgcctctttgaagcatagggagattcagaagcttgggggctgggtgagctgaagcttaagacggatcgtcgggcgcggtgcaataaggagcgtttggtggttagatcgggcgtttcatcagtggggccatggaagcgagtgtgcaacgacaaagaacgcgagagaggaaaatgtcggggaggttgggagtgctggtcatggtcatggccagaacgctgattgacctggttgggtcgcaaatggtcacgggaacccgcagtcatcgtgtacctgtacggagtacggagtacaacatacagagtacgatgaagtactgagtaccgtttgaggtgttcctacctcgcctgacaattctggggaaagctgggatggtatagttctgatggattggaaatatgcacaagccctagtcactgcagaatgtcagtaaggacttgaggacttgacctgtcagaaaatattgcgggtatatacttagtagtgtgggaaaatttcaatattgacaagctttttatttctattgattgggtttaaaacttggggtatccttttgacttgtgcatatgaaagttgatagaatttgacgtgaatgacctctatagacggggtatggacgatgctacctatatctatgtaacgatgtagatgctgtagtcgaatggcctacctcaaacccaaacatcaggaagaaggaaccgaacaaccagaacggaaaaaagaacggaaaagaaaaaatcaaaacaaacagggcaggaaccatggttcctctcagtcaggatccatggttactttgaaaccacccaaattgaattcgactgacaggttttaaaacgaaccaggtacgattcgatgtagttcactctatagaccctcgaggatgctagccaatggtctgtctaggccttcattggactatatctacaatataggcatgcccggatgtgctgcttcaattccaagatgcacaaatgtaaagtgggcagcttgggttaggaaaagtacttggcgcaagttgttttgctgttaattaacctgcttaatgctcaattaagtaatgaagtagtgtggcactgcctcaaccgtggaaggctagttagttatagctgcttttcttgagaaactgggctactagttaactacttaaatagagaaaataagcaaggctatgccaataaaggggtttattcagtgatctatatccttgcacggagtatacctgatctcgctactatcatttaatctggaatcctacggaacgcttggtcgaatgagatccatgtagcaatataagccgaatccttcgacgtctgggcactgccactcagcttagcctactatcgcgtgacaaatccattgtcgtgcatattgtggcaaacctcaacgttcaatacagagtagaccaatccggtattttgtttatattaatcattcaaccgaaatctatttgtggaataatccggagaactcgatatattgcaacggctagccgtaaccatatgttgcagtgctatttgcaatctgtaccccgtacctgtgtcagtaataagacaagaccaagagttcactagtagtcgaattgaacaagctgttctctactccgtactctatgcgacaaaccaatgtgtcaagtccgaaacacaaaagcatacgttataaacagctcatgtgcgattcaggacgtttatttttagaagccagtgaaacacgctcccttaggatcactacaccaaaaggggctcatctatctggaactcttctggcccaaaccagatgttttatagaatgatgtatgggaatatcttctccagactcggtatatcgccaaccgaagatccagtttcaggatcgttacgagaacccacgtggaaaaggccgatcattcgtcattcgaaaccaagtgggcctcaagcttcaataactctcctcagcctccatgggaataaacctggatgatgtaatgtagaatgtatattccgtgaaatcaaattccaaccgaattgactctgtttatatatatatatatatatatatatattctacgtacttcatagactatctagagacaagtaactgccaagacctgctagtcacccactagtgtcagtttggcgtgtttcagacagcgccaaaccagatccatggggtttcaggttgtgccttgtcctctcgatctccaccaatcagatccccctcagttcctatttagggactgccaatggtatgcccacaccatccatgggtcagccagcccaccgttcagccagaccgtgtgaatgattgaatgcaggtggacttgatagcgaactcatacgactgagaaactacatatagtcgaaccgataatagtggggtgatcgaggggaatttggaattcaccaaatcaactccctttcgggtcactacgcaccagcacatctccaccatatcccgtctcaatgtctcccccttgtcatctcggtcctgagccgtttggtaccatgtgtaacagatagtgagagcacgggaattgtcaatcttatccaactttaacagaacatactcggacgtatgtgggtattacatgtattttcctggaggttccaaaggccgaaagactattatctcacctgtaacatcatcgataatatacactaaggcaggtgatggcacacctgtagcctctcatcgtcggcggtttgacgcctgaacattccagggcggctaaatatagagcacggcgcagtgattggtgttgctctctccaactctctggatcccctctttttcgtgtattgtatgttacaggtgaaaatcgatctctaaataaaaccacaaagggtccaaaacccgtatactctcatttttctttctttcctttttctctttctacatcgattctgctttctctttcatcctctctccagttccctggaggaacccgcttggattctacattcatcgcctatattgtgatacattcgattacttctttgatctgagtcttggatctttcattccttcatcttccttggaaaatacacatacccttgtgatctggtatgtggatggccttcctatccaacctcttcattatactcgatctcgtgtggatgcctttccccttgtgatttgcatgatcggatcattagtcgcaaaacccttgcatttcagctgccctagattgaagctaaacgcccattcctcccccatagagatcccatttgcgcaggaagcaagtgcatcttcgataccccgaatgccaatctagcctcttctgagagccggattgaaaaaaaaaagaaacttttcctttcatactaccactcggacaatgccagtacaaactagccagtcctttccggacgcatttccttcttttatgtcggtgtttggtggtccccttccgcgatacaaagaagaagcaaacactatccaccctctacaatacccaacccatgtccctgtcaatacacgtctacttccttccccccaccgcgaaagtgtttcatctgtgacctcggcatctacggagtcctccccgaccaccaccatctcgccctttgattcgcccggcgggggtgacgtctctccgagctcgtccccggaatctccgtctgcgatgtccgtcgcatacccaaagttcatgccttcctcacggcccgtggaacttgcgtcgcgccttgcgcctgtttgcgaaccgcgcctgtcgccaccgaactctcataatacgcgccccgactccccaaatcggcgggcgcgcaatctcaagaacctgtcattgcgaatgccacctccatctcaggctcccccacctatcgctacttcgtcggtggtggagaccacgtcaaaacaccattttgatgccccgctctctcccatcatcccgatcccttccaataacaagagcgcgaggcgacgcgccgccaatcttaccatccagacccccactttcaataaacccttatccggtatcgccaccgatgccgtgcccccaactccatccctacgtcatgcagaatcctcaccttcgcttgcatcgattacatcgccttcgttcgcaccccggggaggtatgaagcttccccggttaatgtcacatggtgcgcgccggttttctagtgaccctcccgatgatgctacgtcccctgtcaccctgaagccgattgatggatctggcttctcgcatcgagttcttgatggcctggaagaggaggatgaccacctcgactcgcgcgagtcgacccgcaagaaggatcgtggctacccggatgggcctatccggatccacgactctggcgtctacctgtatcttgaaccgacagcagaagaagcggccaaatttgatgtcgtgatcaacgtcgccaaagaagtggcgaacccgttcaattctagcaaggatgagcggagtgatacagtgatgagcgcatggcgaaacacctccatgtcctcgaaacgcttctcctgcagcgagccccagaccgcgatttcagaaatgtccttcaagtctgcctgggaattccagcccttggattccgagacggcaatccctactatttccacccctgcaaattccgtaccggagtacctccatgtcggttgggaccacaactccgaaattcttgaagacctcctcccgctctgtgagctgattgacgaccggatcgcggacggaaagaaagttctcgtgcattgccagctcggcgctagccgctcggcatcgctagtgattgcctacggattgtataaaaaccgacacttggatttcaactcgatgtacgaagcagtcaagggacgcagcaagtgggttggcccgaacatgagtctcatctaccagctcacagacttccgctctaaattgttgcggggatctacctctaagcccccgccccaggaatggttcgtccaaaccggccgacgaagctcagagcctcaggttgcacgagctgagcgctcagcgtccaatgaatcaaggccacccttccgtgggctgtcacagacaccttcagtcagttgcctctcaattccagaaacgagatcgatgcgtcccaatacaagcgacgacggtacctacacaaagttcaaatcctactctcccaagcggagtctgtccccccgacccctcccattccgacagaagttccagtccgtgggacctgcattttgccggcgagggttaccgcgtagcgtcagcagctgtgacccgctcgttcagagccatgtgtttctacgcgatgcgccagactccagcgatgatttgttttcgccgaggacaagcgcattcctctcgccaactcctttagcaccaccatcatttcaccggattgatcgctcaccttccatcccttacgccatagggtttgccaccgaaccggcagaccctcgctcgcctccatctagcggcgagcccctgatcatgagatctattgatgaattcttgtgatctccgcctttgtcctttgatacaggcctgaaacgattccacgacccgacatattttccatgtctctttcctgattgaagaccatctgaccaacccggggtcccgggtcgatgcaacccttctattctcttattaatttcttccactcatctaaatcagatgactggcttgatgatattcatgaccaaagcaggctttgctgtcgctcatcgccatttttcccaacttgcatacttactgcatatttctttttgtcatttggacctacgggtcttttcaacgccattactggtcatcatcgctcgaacttattctttcttttaccactggcgtcttgggtgtccaaaacggacaaatatgataccaaggccaggttctgaaaggttgaaacagacctgtctgcttcctttcggcctggtacctgtaatattatcggagggtcctatctctttggggtttctcttacctcccttggctttcgtctcactttcgcttgattgtctcgtgtcactctcctgtttttccatcttgtcaggcaagggatttgcttctgcacctttagtgtcagcattcgtgctgaagcttcgacccttgaaactcacggtatgctgggattatgggtgaaatatggcgtgataaataccccacttgcacattctcacaatagagatcgacgttaagcttgaattatttctcgtaaagctgtaaacatggaatccagtctagttagtttgtggctggctgttatattagaacggagatagcgataagctccgagaacctctccagagctccatcccaaattttccttgcgcattcctctccacgctcgcgacaatggctgaagaatcccatccggcatacctctcacccagcgagctaggcacaaaagactagtatgtgtccttttcagccacacttccttcctttgctggacgggactccatgaaccccgctctacccctccacgaaagctgtatacatcaattgagccaccaattgatctaaagactgcatctgctatctaaaccaattctcaatcccaaactaacaaccccaacctagctgggaatcctactacgcccgcaccctagcgcacatctcacacgaagctccaaagaacaaccccaatgccaacccggaccaaaacgacgacgatgccgcatccaccacctccgacctaaacgaagaagacgaccccggcacatcctggttctccgaacacaacgccccgcaaaaagttctccgcttcctcacgcgcaagtccttccccctatcgccgcgcaatacagcgcacaagaaaggcgcccaccagccaagcgttctggatctgggcacggggaatgggagtatgcttgcgctgcttaggaagaggggtgggtatgttgggcgtcttgttggcgttgattactcgcgtcagagtgttgagcttgcgagggagttgcagcgtgtgagagggcattcggcttatcggagtgactctgaggatgaggatgaatctgaatctgatgatgaagaggaagaagaagcagaggctgaggctgaggaagatactggatctaaggacttgccgggacaagatacatccatccagttcgaggaatgggatatcctcggctcgaaggctgttctttctgagacgggtctcgaggtatcaccctcgtcctcgtctccctcggaggaaacacttccctggtttccatacgatcaaggcggctttgatatcgttctcgataaggggacgttcgatgctgtttcgcttgctgatgatgcgaagactacccgtgtctgtgagaggtaccctgatatcgcgcggcacttagtgcggcgcggtgggttcttgattgttactacctgcaactggactgaggaagagctggtgcactggttcactggtgagcggacgagtggggatcggttggtggtttggggccgtgttgagtatcctcggttccggtttggaggacatgagggccagggggtttgtacggtgtgtttccagaggcttggggatgcttgatatttgagcagacctgcggattaccatgcgaactataccctaagcagaaaaaaggtggagtgcagatagctagtatagcgatatgctgaatatagtactgaaacatttcaatcattcactatagactattgtatactcatctattctgagttcgtagtatcatcatgcaaggggagagatatcgctcaaaatgcacccaagaccatcatcagaaccaaaccaacgactctactcccctctcctcttgagaacagcaataacacaccacctcctctgattctccgtgccctccccttccctaatcggagcccactccctgcgaatctcaccgtcatcctccgaccttgcaatcaaatccctctcatagatcctctcaatcacaaagccattctcaagcgccgtctcaaagaacccggcaacaatcgcccgaccagtatggaacccagaaacgacccacaccttcccaccgggcgaaaggaaccactgcatcgtgcgcacaaggttctcatgctgcgcgcgcatccagtaacaatccgccgccacgattcgcgtaaaggcacctttgttcgccgtcgagaaggagtcatccaacaaaccccattggtgcgggtacactgatactgcttccacgaccgtaggcgagcgtctggccaggttgtactcaacattgaaagcgattgcgccgctgagcgcaggcgaggaggggtggtcggttgccacgaccctcgaggcgttggctagggcacaaacgacggatgggagggcggcgcctgtaagtaatatgaatgcgttagtttggtttgggttagggggttgaagaggatgtatagcatcaacggccagtggccacttaccagcgcctagttccagcacactctcccccttgatcctccacaactcccggttctctctctgggcttctgtctcggtctcgcctggtgcggtgggtgtgtctgcttcctccacggccccggccacgaccattgctgcgctccagaggaaatgcgcgaagagcctgcgtccctcgtcgacttggttcacggagctgtctgcctcgggccgttgctggcttgagcttgggtagctggggaccatgatgttgaggtcgccataccgcggggagctgtagaggaggtgttggcctgggtcgccgtggaaggaaggtgcgtcgtctggaaagagatgggggaggaatgtaccgaagagatcttcgggtgattcgtcaaattcgcagtcggcgtcctcgttttggaattctggtgccggggcactggttgtgggtgtgctaggatgatgatggcgggggaggggccgtaaacgggaatgaagcattgttgtggtttgtgagggattttcgatttattgtttagtgaaattgagtggtctggtatgcaccgaggagaaccaagatttgtctggttgaaaaagtcaattgacctattatcagaggccgttgtgatccattccgagggatgcccaatctttaatttcttatctattgttgcgataagggcttgacgaaggtgtttgcattgtttgacggattagcctttcagccctggaggtccgaccacgtcatgccaacactggcgagtattatggagcatacggagtacaccttgtgagggtcacgggttgaaaggttgtctagttaaacccattgagaacaattcccacagctatagtagctcccgatagctctaataattagatcgacaccgacccaacttcctaacccaataatacggacaagaagaatgtcccgagtgtctcagccgcaggttaagaatggcgggccaggcaccttgggaatgtgccagaaacaggaaagatcaaggggcttcctactcctaagggcgccaaaaataatcccaagtgctcgtgcgcaagaaggcgtgacggtcggagtaatgatcctctcctgtaggcgttagcgcgcgagatggcgcgacctgatcgtagcaatgtggtgacctgagcgattacctaactgacacatgtcttccggggcccgggtgcctctagtgccggcttagtgataagccacgattcatctttgccacaaagatatttttaagtcgcacatgtactccatagttacagggcaacgacctagataggtatatgaattaagtgtatcggggtgtcgttaactacgccgtaattagttagcgaggtcgtagttaactaccttagttaatatctatcaggtgatgcgactgactaaggcctcatgacatcattgggcccaccccatccactcttccaagtactagaccggtcgatgctatgcaggtgatcgatacatggcaaaccggtcgtttccaagtcactgcactgcttgcggccatctcctatcaatacacattcgtcattgcccgggcgggaacccagtgacctgattggtacttgaatcaggagtccaactgtgccatcttgtgaccctagttgatcgtcaggcaactggcttttttttttttatatgtgttctttctattcggctatgtggcatacctccatatattaaagtactccgtatataatcttggaatagaattggaatgattttatatccaaagcctagacccatggcactatccttcagaaccagggcgcagacccttcccctgtacggaacgctatccgagcagggcccgatgttcaaagattacatatttcatattacatatttaacaagattatgcccaacatttgccatctcgaattcaccgggttgatactacaacgtacgtactctgaacatgtctttattcggataggtggatccactatgctatcgccatcacaggcattgcgaacacgcacagagacaacacacaatatagggcatatttaggggcatataatagactaataccacattatcgacaataatatagccctcccgtatagatatcttcgaatatattagcaataaaatacccaaactcgtatgtgtgaccggtgatcgctgcccccccgcatgctcaaagggaaaggcccccgcaaacctgagcgattttggctcataccggccctgactctttctctccttctttctcctcttttttttttcccttccacctttctttttttggatcacctcaccttttttctttattcgctctcattctctctcttcatatcatcttattctcgcattcattgctctcctctacctatacatcttcgacccggaattcggccccatttcaccctcacggaattgagggcagctcgtgttcaggaggattgtcaattccattggaagcttcctctcatttcttaccatggcctcgttcaaggtatgtatccagcatttctgccgcacatcttttttttaaagggggggccatactaatgtaccggcttctttttggccctgcacaggaattatccatgtcgcgtcctctccccaataccagccagcggcatcacacgcattccatctcgctcggtgccctcaatccaaaccaccgtgtaactcgccgaaagagcgttaccaccgctgccgccaatgctgccgcagtcgctgcctccatggagggcggggaggctacctcgctccccatgggtgcgcaccgccgcgccctaggaggccgcaagggactggagtccggttccatcggaaacgtatctggcttcagctcctacctctcccgcagcatcaacagctccaagcaggaatcatcggtcgcccgcaaaagttctccgggatcagacaactccgatggcaagcccgatgaccggaaccgccgagccagcgagggtgcccaactcaagaccgaagggaagcgtgcttcgacggccatacgttgcgatcgctgcgggaaagggtataagcatggcagctgcttgtccaagcatatgtgtgtatcccccctaccgctcggccgtcttcttctagctcgatcgggaatatgcaccatgtcggctctgtgcaggtcgccctcgtggttattcaacttcccttcatcactgcccccccttttttttcccatccctttcagcaacatttaattgaccaatttttttttttcgtggtatcttaggtgggaacacgacccagcatggtccgttacttcgaagcttctcatctccaagcatcagcaggttcaactgctggaggccgcctccgttttggtcaccatgaaccacgatgatccacccgatgagtccgccgagttggagtcggaattgtcgtctggatcgccgggcgccctgtcagaaatgcaggatggaatcagttcggctgagaccaccccacccccaatggactcggaggaagatgacgatttcgagatgtcgggtgtgccggcacagtggaccaaacgccccagcatcagcaacgcatccggtttctctcgttcctaccagtccattccgtccagctcgtacaacgagagtgctccgctgcactcgcctaccttctcccacttccgccactcgagcatcgacacccgtccctcaactgcggacacacggttacacgaggatgacgaggcggatcttgccgcggccatcggcctgtgcaatttcggcactcctcgcacggggcctctttccatgacccgcgacgtgccaccagtgcccccattgccggcgcgttacttggactcaagcagccacccgagcaaccagggtctctactcccctcaattgcgccctacagaagaggccgctcgccgagactccgaggccaacatcttcttctcccggtcgctcaacccgtcgctgtcgtacaaggtgtcggatgagcgtgaggtccggactactggtggtgatgaggaccaacaatcccgtcaacgtcgcaacgccgatgtggactttggtaaccgctccgcgccggccgacgatgacgatggcggtgtctttggccacatggaagagtaaatcccccagtactctccgcgccttcgcgtgggtcaaatcggcgtatgccgaacgatgaccccttcacgatctcatgtacgagcttgagcgaattttttgaaccttcttgtttacatgtttccaacctctccggatggagaatagagccgatgtccaataatcggtcagagctcttttctcaacggggtgtttcacaattctcgggaccttttttcaccaccttttgagatcccatgtatcaatcatgtctccttggtccgctttgttttctttatgttttgtcttgccacggcttattctggagacccctttaaacggcatactccgcatggccggcgcagattaccatccccatcaaatatttatatccatagggacgtgacataccactttcatgccctctatgcttctcgtttgtcttttcccctgttctgtttctctcacctcgcacatatataccaaacccacaaattctacgatccgctcccctacttttcccacatgtgcatctcgtccgttcttttctctctccgtctccttgcccatcctcttctatctctcgcctatggtctctgactcttgtgtacccaattgaccctcggacggggcatacaatgaatatatttcatgaacgtatactattctataatgtagatctacctgtcatttccgcatctgtccctgtgcctgtacatcataagcggggaatcaaaagacccactaaagggtacagttccatatttttgtcgaatctattttcgtcataggggaagacgtcgagtgcattcgagaacagaaagaaagaataccccctatagagtagttatttttgatcaaatacacagactaggccgtggggattacgcgagcttcgtggaattagcatgattgcaggtcgtgtgaccccaggatttatcactctctgaagagcagttacctcgctagcttccaatcccctaacactcatttctttagtcaagaccctccgcggccgacatgctcctgcatagcatcgtccttgttgccatttttaacgtgcccccatccgaaaatgttcgattttatcgccgcagtggacgtcgtttctcgacagaatctcgcgccaatatcgccacctacgactatcagattaggtttcctcatacgatgcagctaggattggtatagtcgcaatgcctcagaatttaggcataatgctcatatgagagttcgctttgaaagatagcatcgattctagtgatcagtacagataccctctctaagaacagtctatctattgcatacagatctattggcttggacactttgggaatttacgagagcgcagaacttcttcgacaactcccccatgtgaccgaagatgtggacattcgctcaaatagtaccacttaagcccatgtataggatggtattttctgtcgctagattcgggtgaaccaagtctgctaccgccagatccttgtgagcatcaatcagagatgagagttacaaaaaaccaaaagccagtcattgacaggacctttgagtggcttccataagctgccggcaacgacaatgagcgctggaatcatcgaatacaaaaggtgtaggagtatcttacttgatccactggaagctaatctagactagatctgcctctttcccatctggcgccgtatctcatctatcgttccttcacggcttgtgtctaggtttaggtttgagagactgcgctgagcgacaacacacatagcggtgcaatcttacctacatgagctactgtggctggctgatcatgctcatttccatctgatattggatatacagggtgcggttctcgtatctagaaaagcttgttagaaaccgaggtaggggagaaattgtacaccgtgacgaaagacttccacccgactggcacggagatgggctttcagcagtctctccgtcaaacgaaggtactttgtgacctcttctacccgagaaaatcgctgtactggagaaccgtgttgaatagtaaagccattgcgctcgagctgaaactggtcttcctgtccccgaatttcctcgccaggaataccgtcaattgtctgatgagtcatgttggtctgaaggcagccattgtgggtgggaatttgaatgaatagggccgctgttgccggtacaatctgtccggctttaggaagaacaggctgggatgaactgtcgaaaagattcatccatcggcatgatcattctttgcttatttgattcagtcgtagtgtgaatcgagagcaaggaaagcttcaaatctgatgtatcaacaagctcttttgctgaacctgagccattccaggctaccggcagattctctgcttatagcgcgacctgtacgctgtcggttcccgactcgcaggaagtcgatgcaagaatccctgtcccatcatcatcattacgtggctccacaaaagcccctgctttctctacaataacaccgttcattacgggatcactcaaacttttccgcttggtcatatctatcatctactggatgtgggcagggcaggggactcagccatctacgggtgtataacaagcttgagataaacctcttgcttcgtcgcaagttcaagccacatgtgtgtgatagtgattgtatatgcatggatatcaccccaaataagcgcccaggacgccacggctcaaaattcagtttgattgtcgtccaccaaatcagcctagtatacttactacatgctgtgattggttattctactgccactagatgtgcctctcaccctattatgcggatactaacatctcgacacacgtagctgtctataattggccatatcatcaccccaacaaatcaagtgccgaacaaaggatgtgattgatggccaacggcgtttaaaattgcagggtctgattggtgatagtccccacatcattccatctattccggggggaatggtacttttcgagagttttgtttggcccctgaccacgtatttattcgagtgtttctcctcaaaaaaaaactcttcgacaagttctgtgaaatcccctattgaacaatcaaggacgacacatatcaaacggtatgtacgtttggcatcaactcatagacaaccctatctctaacatgagtgttgtagatttatcaacatgagctctctccaatgccatcttgacattaccaatgagcctggctcagaagatgagacaggcgaatctgtcacttccgaaggccaggttgagcaggaagccactcatttgcgaccctggaatggcttctggccacgccctcttaccgttctgaagccgggcggcatcatcccgattcagggcaactaaagagagtggttttagagtttaagggatgcgaaacacctctgagcagcggcagtaatctggagattttgtcgttggcgctatcagatcagtcattacagaatgagatgtttatccttgtcaatgatgcatgcattgtattccaatcgaagtgcatcctataaaagccaatgactcttcaatatgatttgcctcgaatttcatgaaaacattctccgacctgtttgacttcacaaggtctgcccaagggaatcaagtcatgagtaagacgaatctggaaagccccatttgccatcgcgggtcagcgtcttccccatgttgcggttgcataaatgtcaaccaacacgagcctctggcgttgttgtatcggaggtacgttggaacgtagtcaaaggccccattcaaatcatcatctggttggaatatattgtcgacatgtagccaggcctgaacttggtctcacagtggcactcaaccgaaaaaacagtggcgagggagggaatagtggctggtgggtcgaactatgctccatgaattagttcaaagccctatgattctatggtatcatagacagacctccaactctggcagtgcgaggaagttgttgtttagttgaaaggtgtgatcctcaaacactgggacaggtgccatggcggaagtgccttactataaagttactagttaatgactgtaatgtcgtctattgcaaataattcttcttgatctgttctaatggaatattccaaggtcaaaggaagtcagttctccgggttacgggctggcccgtatctcccccactacactacgcatgactgggcatccacgtggttggtataagcctttgcttttactaggcccactataactattagcagacctaatcgcctcattttattttttgggggtatcttagaccctaatatcgggctacagccattcacatataagacggttgcgtgcgttaggtgtgtccttgagcaatgagtataagttgttgaaccagttcattaagcagccaaggaattaaccaacacaataagtataagagagcaaaagcaagaaaaggcaacggggtattcacgctcgttctttgatcagcagcctccaccacagcctcctcctcctccacctcctcctcctccgcaaccaccgccgccaccactagatcctccgcagccgccaccggatccgcctgtatagaaaacatattaaaatctactgcaagtcgagattcataaagagactcaccacatcctccaccaccaccgcctcctgcgcagctacctgcggctacggcaccacctttggaaaaatcagtctcagtcaatacttctagaaaggtgacgaagcacttaccacacgtgccagagcaacaattcccagcggcacctacagtaacattcatgcaggcaggattacacgcgtatgaatcacagttgatggacgggtccatcatatatggtccatagtatggcaccataatggggtacccatatgcataaggcatgtagtatggataagcgtcaccctgctgattagaagctttggagccagatcgtttacggcgcttctcagcacgccgggcagccttctcgtagttgctctgtaggcgtaggtgttgcacagatttattccactcgacctgttggtacatgtttgttggccggacggcgttgtgtgaagagatgtgtgggttcttgtttgggtcggacgagatatcggggctatcgtgcaagaggtctgcagcggcttgggcccgagagactgagcgagcagtgatccaccggccatacaggtctggtgttcttgtcgcctcgcagtaccagcaggtacattcgctgtatatctcaccgtcggtgacacggcggtacattttgctagtccaggcaaagccgtccgagagttttccctcgtcgactttgtcgtcgtggtcgatgagcatacgaataccagcatattttccctttgacgtgctgtatttgtagtaccgcgatgggctgagttggtgggtgtgccatgccagatcaacatccagtgtgggcacggccatcttatctgggttgtcaatcataatctggaagaacacctcgtactttttaatcagccggtccatagtgttgaagactgtcggtgagtgcagccagtcgatttggtccattttctccacgaaggtgctttgtctgataacagcgcccacaaggtctagcgcgaagggaccgaggttatcccagtatcgagacatcattcttcggaattggatcttctcgccatacttgatacctttaaggtagacaccatgtgctttccacaaaagatttctgtcgcgaaacttcaactcaaatagctgcctcaagtggatgatattcagacaccgatccactcggccatcagtgaatgccatcaagtccgttttggcagcctgtactattcgtgtggggaatagcatgtcccggagtgcccgcggattgggtttgacagatgggcccccctcggggattccataaagattggtgaacgacccgggcatagggagatcttcgtaaatcgttgcttccaggtcttttcgaaactttgccaccttgagccggccatggtcgatcatgtggtcacaaccgacgcatttcgtctcgaatgaataatcggcgaagccattgctaaatttgaaggcattggcaacaagtcccccaaagcgagcttctgtccactggacagcgttcactcgtccgcagcaggggcagttgacttgcgtagtcggcgggtcgtgcagattattccacttgaagttcattttctgctcgaacagctgctgggcttgttcagaaactgtatactccatcgtttggttgttgatgcagctgtttatcgcttcccatggaaatcctgtggcccatgtgctcatcttaccgtatcgaatgcaatcctcaaggaagttccggggattcaacgaatgagcatgccagaccatcaaaatatctgtaaagtaattagtcaatcgtctttttgccttcaaatcaacacattacctatcgggggtagattttccgtgctccatgcaactatagtatcacaattaaggattctttcatagtcgatacactccaagtcattaatagttgccatcggtcttgaccgggggaggccaatagaccaccacttgatatatcgatcgactgcacgcgctgcatagacagcccagcgcttttcgcgaagacgagcccgcgcttcattcagtgaattcgggaagttttcagcttcagcatcgtagataccaaagatcccgtcatcactagagatggtatctcgcagatctgccagtacggccaaaaacttgagatgcgcaacacactggtcgcgagttacggtagttgaagaagatgggtgggaactcagatccagctggggcagttctaatggcggctgctgctcgacctggttggccgaataggaaggtggttgttcgctggaagatttgacttcagattgctggggtgcctctttggacactttatccgttgaaacacccatgttggcggttgatagagtaagtatgtcgtgagtgagtgtgttgagtcaagtctgagaggcggggtccggcggccctttatattagtttaatgatgaacacgtatctcattatccgaggacacccagataaagacaagtcggcatggcgctttgatcgaactcatgacctttcaaagcccctgaaacggacgaggtggactagatggacatagttacggacaacatgatggcaattgctactactaattggtctgaagtatcgaaagccttggctaagcctccacgaaatgtgaagatcgtggtaaattaacgagaccatcgtattcgtttatcatccgagccaataatccgagaacgttgtcttcaacttcataacggattggttcacgggcgtaatcgggcgcggttgcactgccttgctgccttggtggcttcgtatggagtagggcccaaggctgagtggagatgcgctgtacaacttacattatacattgtacacaagagtttctagtgtttttctagcgcccttttcatatgcttgtcctacgtacttgtggaattactctgtcctatgaaaagcgatatggataactctgacggctcatatccggtcacgtgctaggaagaccgagcccaggtcacgtggagaaaatgggagaatctccggtcaggtgatatgcccctccgagctgactcatcgatgttcccggaagaagtgcgctcaccgagtgggaacgagaaagttgagacggttttgttggagaaagacaagaaggaaaccggaataaccaaaccaaaaccaaactgcgcgtgtcaagaccaaaactttgtatctgcgaatccgtccgaatctctcccactgtctcaaaccgagatctcgatcagcaaaaacgtcattcagcctggcttctctcgggcgatcaaacggcatcggagagggccaggcccaaactcttgaaccgattacgaccattgataatgcttctattggcaccaatcccgtaatggcgggtgtaaatcagttgcctgtctcagttgccgccgatggcgtgcatggtcgcaaacgcaatatgaccattgcggggatcgatagttctccggggagtatcgaggatatggatgacaatgatgcgcgcgaggagaaaagacgtcagcccgtgaagcgcgcctgcaatgaatgtcgacaacaaaaagtaggtctagcgtattaccgcaaaagtcctccagcttgactaaccttttcggattggacagctccgatgcgatgtcatccaagacccttggaccgattgttcacgatgccgtcgactgaggctcgattgtaaaatcgagtctaacttcaagcgtgtcggaaagcgcagccgcaatgcagaaatggagagggaaataatggagctcaggaagcagattgctactggccaaccagtcccaggaatgtcacagcaacaagctttgaccgcaggacaattgacacccaagcaagaatcgagtcaagtcagtcccgcagtctaccaaacaccatcagctatgtccgcagatcagtacatgggatctcaagaagctgtagcatccctcctggaccttcgttcgggcttcgatggtaccaacttcatgaggaacggtggacaaattagacgaattgaggacgttatggttgttcccgagaaagtggcagaactgtttaatatgtgagtccccatctggcaagtctctgtgattgatctaacttcttcccgtcagattcttcacgtactaccaccctttccttccatttttggaccgaaatcagtcacccgatgattatcatagttcctcttcgttacttttctggacaattcttagtgtcggtgcgcgacgctatctaggcgattcgaatttgttgaattcccttgctggtcctgtcagccggctggtctggagcactctagcagatattcctcaaagctatcatgttgtgaaagctctcgctctactatgctcatggccgtttcctacaagcagcacctcaacggatccgaccttcatgctatgtggaatgatggtacaagttgctatgcagcttggtctccacaggccttctcacactcaagacttcagtaaattccgagtggaacttatcgaggatgaattgagagacaaggtgcgaacttgggcgatttgcaatattgttgctcaaaggtatgtaccaaaacctaatcaattgctgcttgtctttatctcatattttactgtgcagagtttccaccggctatgggcagccatcgtctactctttatgattggacattatcctccagcgattcgttagacccgaacttcaagcttcctgacgatataaggccaagattggagatcgaaaagttctgcgatagggtcactcaagcactttacacaaatcgacgcgatcctgttggcttaaccagcgaccacgaacgttcaacaatgattgcctttctatcgcgagactttgaggagttggaagaacagcttaaatcgcagaatgactgtaagcttccgaatttcaagtggggatatattagatgcatgactaacgacatataggtattactgacttgttcctccgtgctgctaacctccatttgcacctttcggcattctttgacgagccgaccactaaaaattaccgcgaacgcgtcttttctctgtatgtcgcgacgacatcattcctcgaagttgtcctaaacctcgagaccgaggttggcccggtcatctcttacaccccgtactatgtctaccagatgatggttgccgccggttgcactcttttaaaactgtgcaagagcttctttgcctctcacatagacatggaatacaccaagaacctattcaaccgtacaatatgggccatccgaggggtgtcagcatccagcaacgaccttcccgaacgacttgctgaagtgttagctcagatgtggagattgggaggagcgactcaaaggactaacaatagtaccgatgttgacgactccctgcgactcaaagttcgctgccggatgagcatgtccttgctttacgactctgtgtggcgttggcgagaggatgccaggactaagggccgaaacattgaaggtcagtactcctttagaatataagatataaatcagaagtcgctaacctttgattctagcctatctgaaaaatccaacaaatcctgactcagcggctgattcttcggccacttcatctgtcgggcctgtacacacatctgcaatggcaccaggaatctctgggaatgatccaagccttgccccggcacccctgctatcccaggctagccttgggatccaacaacctacaggtcaagcaaacggacttccaagcggcttcattgaacctaattacgaagtcttcgatccgttgaactggctgcttgatggcctggtagacttgccttactcacactccacgatggggggagtagaatcccagggcatcgtatagattggcctgctaatattttctcggcgttattgccggttttttttctattttttgcgggcgtggcttgcgttacttgtatcattataccacatatttgatcgctgatacttcccagggagtttgtttatgttgatgttattttcatatccgtctatatttcttatgggtcccttgtacgatgtccttggttcttttccaatatgatgctatgtttggcctcaagtccctgtccagaaaaagccgacagatttagcctcatgcagttataaagtccggtacattatgtacgtatatcacaccgagttatttttgtcgcttctttttacgagcccatattcgctccgtagaagaaatttcatcctagcatggtgatattcttgcttttctttcatcatcctttttgctagacgaaacctatataatctcggtcatcctggcccttcttgtctatttcttctccttcccattgcttcttcagaatacataaaatggctttcctttatcaccttaattggatcgatgtggagcctcgcatttcagctatagtgctgggcttacttgtttcctttctctttttctctgtggttgcggccgctttggtgtttacttcctatcttatagctaacgttggtgacctccccccgtctggtgatgattgtccaaagtacaaattcacaagatgctgatatgatttgctgaggcagaaccaagttcctttccctgcacgcaaagactgtacctcgatcttataccagcagtacaagtttgtcgtggatgggcctagtataataaagaaaggctatgaacaattcgcaaatggcttattcgaaatccctcggacattccgctttggtcaagtcatactatgccagccagaattgattgaagaactaagaaataaacggagtactcttgtctccccggagccatggattgatcaggtagggcttccgggtggattctctatgtttaggctaacaaatattatacagctcctccaggtctctcatgttatgcctggctatttccctaaggaaatgggatggccaaaaatcgctaagaccacgcccggtttgattcgtgccacggtttataaacacttgcatcggtatatgcccgctatgaatcaggcaattatctcgcagttgcagaccctagacttcagaaacgggggtaagttcaggccactctatagctgagattgtctctaatttcttcaaacagaatgccaaattggctgctttgatctggcatactcgatagtagctcgcagtggcagctttgctattgtgggctcgcggctttctcaaaacgaggaatatcttaaagctgtcaaggaccacatccttgggatgatagtgaccactcgtgtacaatttcttgttccagatttcttgaaaccgtgagtgagatacttcattgatttcattttccatggactaagacacgaatagctacattggtgggcttatcggtcgcctcgccactcttgggactagttgggatatgcacgcctcgcgtaagattatgctaagacacttcgatgcacgtgcagcagaatatcacgccgagatattcggtggcaaggggcctagtgagaccaattttgatgagtcaagcaatccggtacccctgtcttcccctccccctccatccaatgacaccatgactgaacgatctataggttgaaatcttccagtggctatatgaaagcagtgttcttcgggagcgatggacatatgcagaggtaataggcgaaatgttgctgctgcaatttgcctttatctataccacgtcctatgtaagtgctctgtacgcatgtcataatcctggaatctgctaatttaaacaccaatagggactttacggcgccctggctgagatagctcgacgacccgaatatattgcacccctgcgtgaggaaattgatatgtttttctctgcaatgggaccaaccgttccagcctgtgatggcatggttttgatggatagtttcttgaaggagtgtcagcgactgcatcccccttcggcacgtatgtcgcgatcacccttgggtattgtattgtgcgtggctaatgcaatgatatgatattagtctctgcccatcgggtctgtgttagtgacctcaaactttccaacggttcgttcttgaaaacacactaccagcaaggaaacattgagctgatcaagtatggaatacaacaggcatcacactcaagcagggctcccatgtagccatcccaagcggaatcatccaacgatcgagcgagcactatgcgaaccctgacgcgttcgacggtttccggttcgtcaagcgtgcagcagctggagccaaggactcccggcttgtcgacctgagcctagattatctggtttttggaatgggcgcacatgcctggtaagtcatgtttctggctggccattttattttcatgtcctggtttcaaacccaaccgcccgaatcccatcggctgacttttgctcgtgtttgtagccctggacgatggatggctagcgcgctcatgaagctcgccttcgcacatatcctaaatcagtatgacgtactccttcctaattcggcctccctgcccttgactggctcgctgtcattcgaggagttttatgtgcccaacttcggagtaaagattgctctgcgccagcgctggtaaggacatcacccgggtgtttgggtgcatgccaaagggagcagctagaatcttaataatgtttcgggaagattaatatttatttcatcatgttggacaatatacagcgcagcgtattctaccacttgaccataacaaaccaagccagtctgacacatcaacaaatacgttggttgccttggcgccttaaagcactatcagataagctgataagatttcgactcttatctccaactgtttcaacttcatctcttcctcgtcatccctcgaaatcatggcatcatcgtcttcctcccagaaacctcgacctctactcatcccacataagcgcgcccttttacccctaccaactaagggacaaggccccaaaatatacaaagtcctcaatcctagcgccatacccgcagaaatgagcatcaaacaatcatacgaagaggccactgaagaaagacgtaaacacacaacttcaagcgcgcataacaaaagtacatttgaagacgaagaagactacgagccccagcccccacgcttcgaagtctcgttctctatgccaccacagcccttcctcgacccaccgacttgggaagcgatgctcaaacacagccgtgagagactagcgacacagtcaacaaaagatgaaccgcgctcagcgtcggatcaggaagacgaatcggtagagcgaatgagacaacgagtggagcgcgagacggagtatgggtctatggctattcggggccggtcaagtgtacgtgggcgtgggaagaggggaaaggggagaggcaatgtctactggggtggtagacattgattttgatgtgttcgggatgagcttgatgctttttagatacccccatatttggttagtaggccagatacgaccatttgaatagccggctgcctttaaaacacctagaatagttatgtagtatcacgctttcatagtacatcgtgtgtgctcctgtattaatacattacttaatggacacatttacatccgccctggagccaagagattattgcttcataggccatcttatgttacacaacgtgaaagcaaggggcagctcggagcccttattcggtcttgggctgattagactgatgaacaggctagaaattcgatacttacatatgctagaagtaaacaaaacaaattaatggtacatctgagaagtcaacaaaagtcgagacaaaggaggaataaaaacaatggaatcatcatcatgggttggttcatggttcataatcatcatagatctcactcatatcaaatgatcatctcgggacatcgaagcaatttcaaaaaaccaaaaaaaaaagcaaatgcatcgtgaaatcgtcgggcaagtgtgtttgaaatgcgtgaaacatatcgaatcatgaatgtgaggataatatgagacgcaacggagaaaaggacatcataagtcatcttatatccacctcagctgtagcactagatgccacgtaaacagggccaccgatactccgtttgaggatttccctccggacagcacgctttctctcgtctcgtctctgccgtacgcgtcgcagacgattccgcacattacgccatgacatcgtctgaagtcgcagtccccagcgagagagagactggaagggagtcggccttaagggggatcctgttcggaacatgccctgatcaaccaagctaccgttgctagtcaccccattaaacaggcgtttcatttctgggctgcggcgtgctagagcagccgggccgtcgaagatgatgtgccgctggggcaggcctaaagagttgtttacaatcaaggattcatgggggcgcggtaaattgttccgcatcggcgggggttctttctctggggacccgggtacgtcatcccaaaatccgcggggccgccaaaaaggatactgacggctgtccatttccagtcctgcggttcggttcttggccgatttcatggagaaagaccgcgctatagtattgaaggaatccgaccgagggcgtgcgctccaggtacgacggacggacctccatcgtcgaccgaggcctgtgttctcatcttgagcgtcatgtaacggaagcgcgggaaagggtctggtggatggtggcttgggtggagtgcgagggttctttaacggcgagtcgacgttgaaggttgctgtttgtgatgggttgtccggcgtgcgagggggttggggatgatcataagaaatcccaagcgcctggaaaggtcgcctctcggaggcttgtacccgagggtcaacaagcagcagtgagttattgttgtgtgcgaacagactgaccgctgtagcctcttgaatttcaatgggtcccggcgaagacgacggaaccgagccttgggtgaaaggaaaagatggaggacgcagggttgccatatcgtctgggctagcaaagagggagcgcaaattgggagcttcgagtagaccattgcggtcaggcgaagccagaacattgtgacgaggcgggggcaccggctgatgctcacggcgtttttgcatcttgaggtcaatggctaagttatggcttcgtagactctcggaagtaagggaagtcgcacgagaattattctggctcgttggtgcagaaagcgacgagcttcgggggggaactgcgggacgctccgtgggacctttagaatcggtctcgcgatatcgattcgatgttgaatcagagacggtgcgttttccctgccccaagatatccgtgcggcccgttgatgctgtcagaggacgacgagttgatagacgagaacctggtttggaagaaacatgactggtcggacgagatctgagagatgagcttctctccggtatgaccactacgttgatggtttcgatattgggctgtattggactgttgctagtcttgaccgggaacggcatctccgatgttccgcttcgaacatcatcagagatgcgagcggccttgtgaatcaggcggtgctgggattcaggtagggacgcataagaggtacgctcagaccttgtgatgggagagctggcagaccgtagagagctcctcttttcggtatgccgaagcattcgctgggctcgtttgggggagtcgattatcatggcctcaacggtggatgtcgaggagatgaccgacaaaggacgggcgtctggtccactaaatattgctggaccctccggtgatgacgacccaatattccgacggaactgctccactgaagtactttctttgacttcaagcgcaccatttgcacggtcctgcagacttttttccctcatcaaagaggcatccaggtgcttcaaatccagtgcttctctctcgggtgttgatttatagactgatttagtgaggttgtgattttgtgcagactttcgctttcctgctaacggtgttggcgacccatcgatggggtttgcggcccaatgcccatcaaaagactcgaatctagtgtcgcatccagtttcaccatgttgagaagaagcaggtgacggagatccttttatatttgaagggtgtgaaagatatacatttgaggtgggtggctttgatggttgccgcctttgtttcggtgtctgggccgtggtctgagacatgcggactggggtgttcatatcttcttcagatgagatattctccaaagccgtttgaaatgaatcggctcgagacgacgaggagaaataattaaactggttcaaggtaggtcgcttattcgagtttgttcgaggaggcgtcacatccggggttggaggcttagaggcacggcgaggggtcaacatttgggatgttggaatatctgacagagaagaattcattttctggggtgttcgttcgtcaaccacgagttcttcgtggcctgcacccgggggtgtcaagggaagcgacggcgtcgcagtatgtctcccagtctgatccggggaggccggttggataacttcgatgctgggaacgattacaccccgccgaggcagcatcttgtgagaccttaagagcggccgctcaaacgcttgcaaatcctccgatgaccccatcttttctacgcccggcatctcggaaacagcacaccacggagacctgaagcatccacggtcgcttttgtgaattcgatcgaagggtttagatatccttgggcatcatagtactgggtagaacgtttcgtttagagggtcgcaagggtcgcatcacgcacgagcacttcgcgaccagatgcgacctggtcaaagtcaacggatctactccgtaaagcccagaggctttgctttgtctctgtatgatgcagggggtcgccgatcgtccgaggtacattcgagtccactgcaaaggacagacaacagtccaatacggagaaaggagcatggatattttcacaactgaagactccgatctgtacaatgtgagctgtaagggtggggatggacgatattgacgagtggctggggagtccagtctcaaaccctcttatccccgtgtttcagccaagtatgaggcaataaataatcatccagacaacggggggataagagaataagagaattaaaaagagttcaaaaattctcgcatgaaaagattgaataatctgacgaaggggctaactacagattccaacctgtttcccgctgattagcgcctgtttcctattcaggtaatattgatgccttgcagcctcatctgcctcatttcattaagacttcatcacacccgtgatcacactgcagatcaaactagcttctagatctgatgctaccatggcttggggttgccttcttattaaggtagtttcagtgatagttattataggttcatccttaagtgtgaattagtggctgaactacatcctacaatgtacgatgtatatgctcgacctaatctaggaaatgagatcatgtggaaacttgaaattaaatatgtcaatattccctgggcatactccgtactccgtaggtgtctggggtctcacggctctatcagagcccttacttggcatggttggcccttgatgtagcatacattccagtcctggggagagaggaatgaaatgcacatccttatttcgcgctctcgcaaatgaagaactacggatgtcaagtaaccaagcacatcatatgtatgtttggattctcttttccgatggctctcatttgaggggatatgatcttcatttgaaagtgtacacctagctaatctcgtactgcgaatacatcaaggatgaacacggtagactttcgaaaacttgaaatagaatttatgcctctaccatatgaggaaatttcctattcgagatccattcacgccattgagcgtgggtggtcactgcatgctcatataatgagtggtaaccctagacgatggacctcccaaggtcgggattcctagatagttactaagcacggcattaggccggggccccggcacacggctaaacctaacgctgtacgctgttggacggtttctcttatatgacttgatctacatagccatgtggggccaaatgtaggtaatatgtcaagatattcctaatacggaatatgttgtatatcaatggagcttcatcccatatttatatcctcctcacttccaaggctggtatgctttcgtagataaagtagataaagcattccaggaaagggttccaaggtcgagatccatcttcatactggggctctccggatgattaggagactagaagcatagcggatgttctcagatgggcaccataggttggttaaagcaatataaatctgtgaatttgtgaatctatgaatccagaattctacagatccaataatcccaagcatgtggcaacgggtgatgacgatatcaatatccacacaagccagggttgtaagacttttggaatcaggtcaaaccagcatttgatgtgaaatattaccttgacaaggtagtattgtctaggaatattccaagaaatcgaattgcctatacaggttaggagttaggaggtctggcctctggtctctggtatcaagtctctggggtatatccaaaagaaagaacatcccacagactatgcaatgaagatatcagaataatatactttgaatatagatagattgcccattaccgtggatcagtggcgtaccatgacgtcctgcgaggatggtggacttgtctggtcttggcagatgacatcgcagggaaagatctctcatttcgtcatagttctcccccgccatcatcttctctctctcctttttttcttggtctgtaggtttctggtcttgcttttctctctattcctcttgtttttgtgatttttcaaactccatcagtggagtaaatccatccttcgacttgtttgaaacgcttcccccattgaaaatccctgcttcaatcgccgacacccttctcttcgatctctctgttttcctttcttttccgaaatcaaactaagacatccaagacatctgtttacgaatcgcgattcttcttcgatatcatgagtacaatacagaatatcaagaatttcatccggcatggcaagcaggcccgccttgtcacccctcattctgagccgacgaccgacgtttccaccatccatgcagagccacaacgccaaccgataggtcaatattcacctgcgctcgaggcgtttggccctgaaggcagagccaatgccctccagaaacctgattctcaaatcagacaggatcgctctgtcgaaatcgaacgtctagtggcagaggagaacttgaaccgatcaaagatgcccaaataccctggcctagagcgctggatcttggtagagaagatgggcgacggcgccttcagcaacgtctatcgggccaaggatacgacaacggaatatggcgaggtggccatcaaggtcgtccgcaaatttgaaatgaacagcaatcaggtaggttctaccgcgaggtgccttgctcttcttgttttccttgtggtttttgtgttttccttccttcatcgttacatggtttgcaatctgtctataaacatggccaatacgttatgtagaacgatcctcactatccaacggtcaaaaaaatccccaaggcggcggaggtgcgcatacaattctttttctcacgctcggcttacttcatggcaacttgcgtctgccggcgaaatgatacactaccctatggcattgcctttttacatggttgtgcatcaatctcgtttcgtcattactgactagtcatttttaacagcgggcaaatattctcaaagaggttcagattatgcgcaatctcgaccatcccaacattgtcaagttgattgatttttccgagtcacggcaatattactacatcgtccttgaactttgccccgggggtgaattattccaccagattgtccgattgacgtatttcagcgaaaatcttagccgtcacgtcatccgccaggttgcggaagcgattgaatatctacacgagacatcgggtgtcgttcatcggtttgtcatcctgtctgtagcgatttgcgcttgtgaaagctaacattctcatgaagtgacattaaaccggaaaacctcctgttctatccaattcccaacgttcccagcaagaaacctaaacctcaacaaccaggcgacgaagacaaggaagatgagggagaattcgtccctggagttggtgccggtggtattggtaagattaagcttgcagatttcggtctgtccaaagtgatttgggatagccagaccatgacgccttgcggtaccgtcggatatacagccccagaaatcgtcaaggacgagcgttactccaaaagtgtggacatgtgggccatgggttgtgtgctctacacacttctctgtgggttccctccgttctatgacgagagcatccaagtccttaccgagaaagtggcgcgcggccaatacacttttttgtcaccttggtgggatgatatttccaagtcagcccaagatctgatctcgcatctcctcaccgtggacccggaaaagcggtacaccatcaaggagttccttgcacacccctggatccagggcaccgacgaggagactaccgctgccgcagacgcaccccctctagcaacgccctacctccatacccccgaaaaaggcccgcagcagcttgactcctccagtgccgaacacgggccctaccagcctgccagtgcccgtttcctcgatcaaccatccgttgcagcagaccggcgcatggacttccgatctccgggcgccttcaacctccgtgaagtctttgatgttggctatgcagtgcacagacaagaagaggaaacaaagcgtcgtgcgattgcgcgccaatccaaccgcagtggtacggcaggattccagtcggcactgggtgctctcaacgaagattatgacgacgaccccgaatacaccaacaacctcggaggccaaccactctccaaagtgcccactcgccaaggtgacatggccggaatggaagccaagctccgatccacgaacctcggtgctcaaagcagcgctgcacaagcacgacaactgccccaccagtcaaagcccaaacagggctacgggatgcatgacgccgctgtcgcgagcgctgcaaagagctctattcgcaagcatcagcagccgttcgagcttactctgagtggttccacattgcttgagaagcgtggccgtcgtaatcaaccggtggcataaacaggatgtatttcttccattggggtcatgatgtgatgtcttcataacgtctttacactttgttgatgagcgatattttcagatatttttatctcttgtgtttttgtttcatggccattttcttctttgttcgttattttctttttctcgagctctttgcgcgttatctgatcggtcccggcgaggaacctgcacgctacatagtcacaattggaaaatgggtgaagtgggttttctttttcgctttctcttgattatccgggagcttgcttggactggaatggagttctggcattttcttctttttctctttgctgtcgttatcataactaagggttacgtccatatttgtcaaggattggataagcatatttttcaacattgcaaggttggaaccttgaaaggtttcacgtatttcatataatcttcctttgagtagcagtctccatctagtcttttcttatagtactgacgtagaaacttattcccggccgctggtctattaagccgaagggcgaggtactataaagctatgtacttgatttcctccgccaaggcttcctatcttagctgtcgcccatttcttgggggcgctcagagtcaggctcactgagtagatttcagtcggggctcagattcagtgagctgctcagtgctcagataaatcatgtgatggaccactcaggcgcaaaatcagggcataaccagttgatcgattaacgagattgaatttggtaatatgataagaggtggtattctgccaagagagaaagaaaaagaaaaaagaaacgaaagaactcaagcggggagatcacgaataattccagcttttttctgcgcaacgtacagatgggcatttccgggcgaggtggcaaagaataaatagtcacgcatggccttccctgagaggcgtacatctcccggactgtctggcttcacaatagcacgctcttcaaaccagggggtaagtggcacaaaggcagaagtgagaatttgcatgtcaataaccattgaatgctggaaagccgggccattggcggttgttacttgcactacgcctcgcatggctccaatgtggagtaccatgttgaactggagtgcctggagatcggaagagaagagggtaagcacgttgcttccagtatcattgcatactaagaaaggccgtgtcaagtttccgatgccaccatatctgggagatatcctgatctgagcatgtagctaggttttgttagttaatgacctcaattaatcgttgacgtaactcggattgatatacctggtgcatatggagggtgttcgaataagcgaatgtttctgaaacagactgggccatttgctgcggctaatattcatagcacatgattagccaaagactcttgacaataccatatagggttggttatatgatatttgcctggaactcatgttgcgacatcatttgctgataatctaatgtctgaatatgttattagtatgagccagtataatatatagccaataggtcgaaggatattcaacaacatacctcgcaccatctgattcctatcttagccgcatcttcccacgagtccttgtcgactcgttgtccatcgataaggtagactgggggatcggatcgttggcgtggtccgagctcgccactttcatacaggcgaatgagggcttcggcattcacacgctgggcttcgccgaaatcagtctgcagacaagctttgagttgctcgacgcgctcttctggctgcagaatgttggggatcgccggacgactgagctgctgatactctaatgtctgaatatgttataagtgtgagccagtatgatatatagccaataggtcgaaggatattcaacaacatacctcgcaccatctgattcctgtcttagccgcatcttcccacgagtccttgtcgactcgttgtccatcgataaggtagactgggggatcggatcgttggcgtggtccgagctcgccactttcatacaggcgaatgagggcttcggcattcacacgctgggcttcgccgaaatcagtctgcagacaagctttgagttgctcgacgcgctcttctggctgcagaatgttggggatcgccggacgactgagctgctgatactctaatgtctgaatatgttataagtgtgagccagtatgatatatagccaataggtcgaaggatattcaacaacatacctcgcaccatctgattcctgtcttagccgcatcttcccacgagtccttcgccgaaatcagtctgcaaacaagctttgagttgctcgacgcgctcttctggctgcagaatgtagggtatcggacacggacatgcaggactgaattggggatgtggatctggcatattggagatggttggtggaaaatgtggaaaatgtgggattgtgtgggttagaggaaagtggtggggctcgcttatcctagtctggttagcgtgtcacatgtctttcattggataataataccttaccgcctacatcaccgccttcacaaaccatcttcaataatagtacgaccaaccattgatctcagactatatggcttttttagtgtatttctttggtatcttatttggtgtattttatacttatctagcttttttagtacttatgtgagcactgagagagcttctcccattcctcatggccgtctttcgcatccccaatttaaacgaggctgaggtcgtggcacaggtcgtggcactagtcatacagaaaggctgaactctcttctgaaaaataccgctcgttcaaggcacagacagaataccagtaagtgagctttaagggatcgctccagatgtccagtgggcgaaagccacttttacccactgagcaaggtaaatccgaaagtggcagaggaagtcaagtacataggtagacaaagaccagtggtggctttttttttataggccaagtacattttatgagttcgtgatttgacctggaatttaagagagaaaaacacaaacttggtatcttgattggtatctatgttcaagttcagaggccacctgggaatggccactggatgatgatatatatgacaagaacactctatccggtccatatattccccccgagtgctttgagcatgtcaatccattggtcgaatcattcagatcgcaatggcaagggaacggattcgtgatatatgggtgcggtgtccgttttcattttgtcgagttctcatcttgcactttccaacacaagcagaaggctgtgtgaaaatcgacaatatgcaagacattttggcaaaccgaagagatttaatccgcttcttaaagggtctgcttaccccgagtctcaatgggtagaagacacatagctacaaaagaagccagaatcaacccgccggacgcatagatgggcgagttggggttcgcactaccggcatatatagcgacaaggggagcacagagaccagtgatacggttcaagcagctggagataccagtgccagtaccgcggttcggagcagggaaggtctcgggggtgtaggcgaacaggacaccgtacataatgttctggaagaaggcctcgagagaactgcataaaagctggatgtctgagttcgtagatacggtaaagcagaacagcaacacaccggtgatcaaggtggagattgccatggtgcccttgcgaccaatgtacttgagctcgaccgtccagcaagccagaagagagccaggaagaccaacgatagaggtgatggcgtaattgcggtaagtgatgtagttcgagttggtctcaccaccggatttggagaggtactgcggcaggaaagcgttgaagagagggtaacccatgccgatggtggcccagcagaaccagagcagaacggtattccagcccatgcgcttgttagcgaacaggggcgcaatgcgctccattgaaaatttggagaagaaacggcccacgatttgagagtaagggagccctgtctctttctcgtgcacctcgacatgaccaccaatttcgttgaggatctcgctggtcaaccaggtcttagtgccgttcttgtgggcaatgccatgaatagcggcgacggcttcttcctggcggccacgggagagcaggaacttgggcgactcgtacaagtggaaacagaagaaacgtaggatgaacatgacaaaagtgatggcacccagagtgagaaccaggtagcgccagcccatgttgttctccttggtgcaaccttcatagctagtgcagctgaagttaggaatgaaagcccatgcaagcagactgccgattagttggccaaaaggccaccagatactcaacatggtcaacatgttgccggagacaaaggggaggaactccaggaaaagagcaccatcgacaggcaggttaccacctacaccaagacccaagcaagcgaacagagcacatgtactgcatttatgatcagcgcaaaattcaaaatgagttattctcatgaagacttacccaatccaagtagggccaccaccggcagccagaccaaaggcaccagccataaatagagtggtgttaaaagcaagacgacgaccaacaatatcagacgcaataccccagaatgaggcaccaatacagagacctaagaataaagcacaagtggtaaaacgcacccacgtatcggagagtccgaattcgtaggagataggggtcagcgtcagggcaactccctacacatggttagatttgatttgtgtgatttgtttgatttcgatctcctacctgaagccaaaggttgtctgctgtccaaccaaaaccacaaaggaagaacagctcccattgataccggcccatgccgatatcctgcagggctctgttgatcacctttgccttgcctgtgtcgtcgagttagatcaaacccccaatttcagggagttttcatacgggaactagtgtgaaaatgtgggatgaacatacggtcataggcagagtcatgggtagccgtggaaatatcagactcgatttctgcacgaagggcttcgagggtcagatgagttggatctttggagccagcagcaccattctccgaggaagacgagcggtccgagctctggctggactccttgtctatcttttccgagagggagtggacaggcgcatcggcgagtggtatgacaacgctgggaaatgtcggactatcctttttgaaagggttaaatttttcgagtcccataatgacggttttatatggcgctttggaatatagttttcagtcgcctgggatttgctgcttcctgtctggtatgtcgcttttcgcttgttctataccgtgaatgtatcgctgggaattcgatgagaggtcgacggtagatctacagatgtgggaaggagttgcaatggggtcatatatcgtaaatccgggggcaattcgctgtgggccgaaagtgtcgcaaggacaatggtcgagatatactgctgtcagggtttgcaaatgggcttgtcgctatcgatgctgggtttgtcgcagtcgcagtcgatgagacagttgtctccagggtagtgcaagcttgctactgaagagcggaagtacctcgtgcgcggcctttgttgaaatggatttcttttctctcgcaaggtgatgatgaatgatataaatgatccgagggcatgaaccagaggttctgccacagggatataagataaaaagctaagagacgaagctctagcaagatatatgaaggaattaaggcaagctgggggtagctataccttgtccaagatgttttgagaggtagcgaggggaaagttgcgaattgacaaaagaggaaagaagggaaaatggcgaggtgggattccagagttgctatatactattagggcaatatgcttccttttttttctttttcttttatattaccattggttctctagtacgagatttcatcactggtcaacgccgaaaagtgggactgccaggaaaaggtgtgatgacattctgatattctgctatggtctgtaatttgaacaaatctgaacatttgcccgcctttggcctcgccgagtgcatataaattagaatgaagacatacttggcagttggacctgatatgtttccaggtttggaaaccgccctaccacctgccgtaactagaatgagctttctataatgtctatctccccttatttttctgtggttgggctttcatagctgtaattaaagcatatcctcgtactctattggtaaattcaacactcatcttttatgagcagtaccagcagaatccaaggtggtcaaaaagaaaattgtacataagaggttccactatggcgtattatattagtaaaattgttgatgttagttaataattcacagctgcacagggaatagctcaaaaggaatactcaaagacctgtagcacggtacttctaatgttcttgcgatctaggattgaacgccaccgaggtaaatccgatatactattcagcctcaagggtcttcaacttctacctttatacatatccggctactctgtatgcaaaattcaaatggtcctatatagtcatcacagatatatttaccaacatatcaaacattagaaaaggtcgaaataatgaacacatttgactctaccctgacccgagacctcattggccttcatgatccaccagaaaaattttgcagtaagacagaccactctatccgtacccgtacctctcactagtactcttgttttgggcgaagtattgagaatacggagatcaagaaccgcatgcgtgctccgcttgaacgtcaccctctacgttgcccttcttacctctctcccaagatattcaagatgttttagttctacagtataataatataacagcaatcctggatccttgcgaataccaaaaataacgttaaaatcttgtacaacatagaataagaaaacaaaaaatggttgaactcaccaacgttgaggatcatgaatcttggcgggcgcatccatgccgcattcagaccagggggaatccttgctctcggccaatcacagcacttgaatactcccgtaacctccaaggctccttcccggataacttactgcttgccattttgggagtgttgtgcatacggcctctagcattacctgctcggaaactgcttatgttcttgacttggagagactctacacggctcaatactgcagagaataggtggctctcggttatgtgtcgaacattcttaacatccggtttttgttccctttcaatacctttcttgcagagtggataagtcaatccgaaaatttggagggtcaggaacgactccactaagaatagcttttacctttaattccttgtgttggatcactacggtccggtttataacatacaacatacaaacaaatcccctgcaccggcccggcgattgtcgtacatggtttgtcccttttaatatgcgaaactggtaaccagctagagtacaccacttggtagcggcttgcgatgtatataccagccaaagggttgtgcgtgatttctctgagttatactgagtaccttgtagggcactgcaagagatttcaggtactcgcaagcttaggcggaatgaaaatactactcctaccaataaagccgattctaggcccgccaagacttccacacatatgttgtaatgaaggcctaatcgggcaagatattcggcattcattacagtcaatcgtatgaggcatcagaaatagccacggcatagggaatgataaactcgatgggatttgatctctagataccctatggtgatacactttgtagcctatttccagactccggtgtcatgcatgagcggttctgccctataaactacatagattcatggcttatattttatatacatattgtcttgatataaaatctgcatatgtgaggattcgtcctttgctaataaaacactagagttcctcggtgcgtctgagcaaccattcaaggtggcgataagccacacgaggctggtactgcggttgcatgtgaccagcctggtaactctgagcccacatcagaccacgctcatagtgctgaacacccatgataccctgagaaccatcgagactagacgcaccgttctccgcaaagacatcggcgtacaagaggtccggaattttgatatcgatgggagtgtgtggcttcttttggaaaccgaggtggccgttccaggtcatattctggatggctaggagcgtaccgttggtgataataaccatgtcaaagtcaccgtttgcaatgagaacgcggttagtagcctcgatgacctgcggcaagacgtgctcgatcgggttcgccgaaatgtcgccttcttgctccgggccggagtcgccaccgacatacacgggctcgagggaacacccgctccaggtctcattgggcgcgtgtagcgctcgcttgacatctgcgcgatcgaagtagacgcttgctccaggcgcttgatagtcgagcgaggtggggaaggcgagaacgtcccagaggagcgggcacatctggttgatctcgtagaggttgaagcatgggttgatgtggaagatttcatcgtagacgaggtcaaacagatcacagtcgtcggccaagctgctggataacatgggcggctggactttgggtggcgggaaagtgaggtacttgtcgatgaactcctcgtatccgcaggatttgtgcttcttttcgagctctgccatgaatgattcgttgaagttaaacaggtttgcgttttgctggacgaagggcacaacgggcacttcttcctgcacggagtcgaactgtccaatgcacgggtcgtatgccagcgcgcctgggtaagtagtcagaatttgcatccaagcctcttgaatattcgcgataactcaccatctaggtcgaaatactccttgtctttttcgtcgagcatcgcagctgagatgtagggcacgtaacgtccagcataactctcaccagtgacatagatcttgaagttcttaattccaaaaatcttctggaagttcttgaagaacttgacaaagtcctctgctgtctcttcttgtgaaacagcagttggtgtgccgacggagtagcctgttccgataggctggtcgaccctgcgagatgttaacagggtttggggttcatatgcatgacaattactcaccacaacacattggttaggttgacccaagcataagggttctctaccggggcaaaagtaccaggttgccatatgaaacgaccagtctcttgcaagaaactctccatcgaactgcatccagggccaccgttgagccagatggtcacttcgtctacgggctcgttgatggtaggctggaaaatgaagaagagcgatctggagctattgttcatatcaattggcaccagaccagaatacatctcgccgatatcaaatgaaacatccggcagggagtcgaccaggtaatctataggtctattagagattttgctgctgacaatgatatagctcgacactcacgcttagtcttcttgctcaagaagcggtaatctttgtccgatttcgcatgtttctggttacgagcctcaactgcccgtttggccttctcttgtggtgcacgagctatctctgcaaagcgaccgtgtttggaggcagtcgcaagatccgatcccagcgaaagggccaggagagcagatgacaggactgacttgagtaacatcctggaccggtgggtatgaatgggccagagggcagatgggatgtgtctctttttttgtctcggggagaggacgcagctatatactacccccgaaaggccctaccaatagccccccgaccggtgcactcggtatctgtaggcccatttaatttaataaaaggctaccttgccagaccaagtgcttccaagtggatgattggaagaaatccttagctccaggccggatgcttcttctgcgccacctgggcacgaccccttgttcgtatccactgttatcgcatcccggggtcgaccccaggatggtaggctcacctgtgtatcttgctgctacttcttttgtccctggtctaggtataacgccggtggtttgtctgcgatgttgggcagttataaaaacgctaatcgcatgaatggttgctctaataattcggtcgcattgtgcatagctatcattgggaccggatgagcgacggattccggcgagatcgacgtttatctctcactttgggataacaaactccgtgagcgaaaagcgggggcagctcgcgattggtctggtgtgcttcttgtcccggataagcatcgcgtagcctggaacagttgtattggtctgatagagaaatcttcataattattcatatgttgtacgtactgctcaaaacctcacatatgaacatcatctgacttatctcctttggtggatagattcggcataccggggaagaatactgccaggtgagatccgtatatgagccgaggttcccgcagctcttaggtataatttagatcctaggcatgccaagctttccaccaatagtagctcgaaagcacttgttctaacaggcctcctttcactgaatagcatcagctgatgtgatcaaaatactcgatagacatgttccttttttgagataaataagggtccttctactccgtagtgtttgtttgtttaacgtagtctcaaaagcgaaaacaaaaaaaaaaaaaagaaaaaaaagtggactcgcggggaatcgaaccccggaccactcccatgctaagggagtattataccactaaaccacaagcccagtttgatggaagaggctgccttttaaatactgatgagcctacacaataattcttgcgctagactactcagcagacaagattctatgctagtcaagtaagactaaggttgcatttttaaatattacatgtttcatgcttacacacttctagaatttccagcctggggaggttatatgagattcacatacattaaatggccgatgataaaaacctgatcgtggttatatatatatatctacctgcatcaccatccgattgcgtgcgattccatgtatagtacatcaaccttctactttttctttagaattgtagtaatgtattcaagtataaaccaactaactagtaaagtcatgtctacttacgaatagttaatgttatgcccggatgtagctaagtatatgcgctccgcatgcgtttcgaatgtctcgcggagttcggaagttcggaagttcggagttttaccaccattcatagctatagccgacaaatacattgaatcatcccgtatagattgtcattctatatgatgccaacaaaaagaaccgtcagtaatgtatatcaatcaagctatgttgttcaattgagagcaccgagtgatagttctgaagtcccccatcatttagtcggtgtagaacaacatgtatagacaaataatatccccaaggcgtcgggtatggatctaagcacgatagatccacttccttccctgccaattatcacgtaccccgaaaatttctcttctttaattattacacttaaactccaatgggattgattccgcggaaaattattagcctgggcacttttgcatatgagtcttttggaagtttcgatttctaatatgtactgcccctccttcaaatactttctcctacaatatcatcctggatcctcaacctcagagatctaggacttcattaccccttaatgcaacaaagagaatataatagctgctctctccacatagaatgtctaccaatgtcgggtctgccggcggcaagaccggcgatcatgaattcgatattttgaacaccaaccagagcgccacatcctttgaccagaagactactgctcacatggtcaatgagaagtttgacacggaggctgcaccagagcaagaacccagcctagatgatgtataccggacagcatccaccgtggcaccatctcagagatcagccagaagagaccccattagtcgagcgactacagacgctgaagggaacatctaccccgagggaggactcgaagcctggctggtagtgctgggcagcttcctcggtctctttggatcgttgggcctggtcaacaccattgccacatttcaagcatatatccaaacccatcaactaaaggaatacagctcaggaaccaatggctggattttcggaatgtttgcctttctcactttcttctgtggagtgcaggtcggtcccatctttgatgctcgaggcccacgtattcttgtcttcgtgggttccgtgtttgaaatggccatgatcatcctgctcggcttctgcactgaatactggcactttatgatggtcatcggtgtactgggtggagtgggagcgtccctcattttcacaccggcggtctcggcgattggccactatttctatgagaaacgtggagttgcgactggcgttgctgccactggcggctctgtcggaggcattgttttccctctgattctagaagctctattccccaagattggctgggcctgggccactcgggttgttgcgttgatctgtctggttgtgctatcaattgcaaacctcttgatcaggtctcgactcccgcagaagccattttccaaggagaacgtgcttcctgacttccgcatctttcgagacccgcggttcgtacttactaccgccagcgtcttctttattgagtggggtcttttcgtgccaattagctacatctcatcctacgccctcgaccatggtttctctagcaagttctcataccagataattgccgtcttgaatgccggctcattctttgggcgatggctgccaggattctttgccgattttcttggtcgctttaacactttgatcgcgacggtagcgctctgcgtgctctgtaacgcctgcctgtggcttcccgctggagatagtatgcctctgctgatcgtttacgctgttatttttggattctcaagcggcagcaatatcagcctgacgccagtctgtgtcggccaactctgcaaaaccgaacactatggccggtattacgcaactgcctataccatagtgagcttcgggtgagttttttttttacttgtgatgtcacttgcgtatctataactgacatacgtttgccaccagaactctcaccggaatccctattgcaggtgagatcctggcacgctgtgatgggtcttactggggccttatcacctttaccgtatgctgctatgcggctggtcttgcatgctgtaccgccgtgaaggtcattgaagttggctggcgtcaccctctcgcgatctattaaatgtttggattcggtatccgggaccccgatgctggttgatctaataatctcgacacgatttcatgatttcaaagatgagcatagacagaaaagtcctttcccccttcggcttgcattttatatccggcgtccatgaccgagtgatttgttatacatatgtggttgctagtaatgtctatatttatcaatctgtgattgcaattctatcgttagccaactagtcggatgcaatttataaaatttccgacatgatcggttcggcccttcagctgtactcgaactggtagctagaaataaaataatttgccgccattgaggcaatataaaaaaatataagggttggtaactcagggtcaggttccctgcagggctgaacagggcagaacacgtcgcataagatatccgacaggcaccggagctatgtaaacatctggtcacaatgatgcctttgtaccttaaccaaccatggatttcaccactgggaatgatttccaataggagcagactcagctcttaccatggaaactacaaagccatcgaaagcttaacaaaaaacaagcatcgacatcaccccaggccagtccctgtcgctgctatgacatcaaatggccattaatccatcaccattgagtcttctagcctctcgctacatatacaacgttaatctcgcatctcctcctcaacatccttttgcactcgggactttgctttcctttcaatcgcctcgaactctctggtgagcatttgcttcgttgctcaactcgctatctaagaagtcctgacggccttctacaccagctcatccatcaaaaccacagcacccggaaccaccggcaaacttgcatcggccacatttgctcaatcgtcctgcatatacttgcgctggtccgaatcatgttttcaacaagatgcttggttctgctagcctgctccttgactcttctacggggtgtcgtggctgtcccggcggatgtggcgctagagcagcccggccttgaggatcgtcgtcgagaggagcgtgactttggactgcaggagcgccacggccatcctgagcttgagagctcgctactttctattctaaccgagaagttagctacgaagaccgccccaggaggaggaggaggtgctactaccgtccccggtgaaggtggcgctactaccgtccctggtggaggaggtggtaccacggtccctggggaaggtggcggtactaccgttcctggcggaggtacagttcctggcggaggtggcgctactaccgctcctggcggaggtacagtcccgggcggaggtggccccactaccgcccctggtggaggtacagtccctggcggaggcggtgctactaccgtccctggcggaggtggcggtactacagtgcctggcggaggaggtgagaaatctactacattattttctgcaagcactattcttactctccctgatactcaaggcggaacttcacccggtggaggtacgactgctactccaactgggggcactgaaacttctcccactggcggtgctactacgacaaccggacctgctcctggcggcaatgttagtctcccccccacaagcggcagcgtcgggccacccagcggccccgcttcctctcccggcggaaccactcaatacatccatcccctagtggaacccctcacccgtcctctcctgaagtagtaactgaaaccactaacactagccagacttctcccactaccagtgagcagccaagcaccacttctcccacgggtggcggtggtgtatctccttccccatctcccagtgttaccactggaggcggagttccaccggtttgccccactccttctacatctagggaaacgacagtcgtcccagtgacggtcacctgtcccgccgtcgtcgtgagcaccgccaccaccaccgtcaccgtcacatctggtccggccttgtcgggaccaacaggttgtccttgccccactgaaggtcccggtggaggtcctggaccgggtcccggaacaggcactactggaggccctggagcagttactagcgaagtgtccccaagtggcactgcaacagcttcaacgacgaccactagcgaggtctccccaactcacagcgtgacagccccaacgaccacctctagcgaagtctcctcaagccacagcgtgacagtctcacccactagaaccggtaccctgactcggaccctgacccagacccggacatcgacgccccttgtaccaactactagatcccgtaccacagtcaccaccactacaccaggtaccctcgtgactttgcctacaacatcacatgtagctcccggaacaccaggtgcgtcacgtgttactccacgagaatttatcagtcaagatgttgttcgccgacaattttttagcaacgccacagcaacccccctcttcactaacacgagtactccctcgaatgccacgacgagtgcagtgaacatcacccgtattgcgacggagactgctaccgaacccgcgcccgctttcctgcctcgcttctaccgtggacggatacgtgtttaaattgtttggctgagttgggaagaattgactgagatattggttggttggtcgttggaaaatttagatcggtttggttattgccagtttttgatattttttctatagtttgagaggagtttaatgtatttggtggtaatatgatgttgctggtgttcaatgtatggcctcgggttttgtttcttctaccattgacgcaagtgtctggaaaccactgctagagaatacattgacactttaagacatgaggcttattatacttgtttgtgacaagtcatgatctactctctcgaatctatagaaaatacatgtaacgatcgcttgttttgaatgacgtacagaaggaacaaactacgttatgtgagaaacgaggacgggattctatcattggtttttcttctctaaaatcaaaacacatatagaagcagtagcaatgcaccagaaccgaaaacccttcaaacccttcaaacccctgtcaggtctatagctcacactagatttccgcctccaatagagcctgacctatctgtgacggcgacgactattttgccgttcaaactcttcctcgtcagaaatctcttcgacatctgggtcccactgagcaggttgttgcaaaacggtggggatgcagctgatcagatcatcggcaacgtcctggtcggtctcccggtcgttatgcttgcggagaatcctgattgagataggtatgacaagctcaaggttacggcacagccgctcaaactggggatcacgttctacaaccgcacttgagatagatatgtcaatttcgccagcaatctcctcttctaaggtggaaatgacatcgttacgacgatgtggtccatggcgaagatagtagattgcatcgtgcagacatgacaagacgaaaatacgtcgctcgttatatggatcatcggctagtacgcgctcaagatcatggcgaggcatcgtaggcgaacaccagactggtaatggagaagccggttgatgtgtgacttgcaagtgaagtttgttgacgattcctggaagcgaggtgcgacaaatagttggattgcccgatgcagaatccgatgtgtcttcggtatgtttgtataagaacttgagaaggtggtgggaatcgaaattatttatgcatttgcacggagtagagttagcactgattcgatttcatggttaacgtgtttgacaaagacagcaatgacgacaaaacattttatttttattctctcaaagaagaaaaggaatattgaggctttgattaaatttcgggagacaagaaagaaactcttcgcctccgtcatactcacaaagacactatttatatcttattaaaagagaggatacagtccatgacagggaaggagcaagaaaccggcgggctttttcgcagttgcataggagtcaggatactgagagactggaaatagccccaaagcattcgtaacactaatcccataatctccatgcaagtattatgctgcaggtattggttctgacactttcgtcatgtttaaattcgtacgtcaaatggatggactcgataaacaaagagaagagtacaaagagtaaaccaaaaaagaaaaataccggtgaccatatgccatcaaataaagaataaactgccagtgttctcattgcgtctttctgaagaatccatagatgttacttgtccgctaagtccatcagtaaggatttcgacagatttggacatttttcatatcacttctcaatactctccctaatctatgattctttttcctagctaggcaaataaaattttggtatacactgagtgacatatcggcaccttttataaatattgtatctctcgtctgacggaggcccgatgtttcatggcgttcaagattgagccggaatcgttttccgttgcttacatgtaatgtactatgtagttacttctcccaacccagtccctgcgatataacggagtaattaaataaaccacaccctaccagactttcaacaatatcaactactccggaccgctatatatactccgttgactctaattatctcttatcagttgcgccgataaagccgacacgctccacaatgacttgggccaatgacgcaacgacctgcctgattggggttagcggatgtttggcatctccacatgatccaatacgagcccgtcccccgcgtttgcttttcagggagcacatatgagatcgacaatctcgccgaatgatacggggtgttcgagcatatctacaacgtactatgtacatagccgaactaggctgccatgctgtctatatcagatttggctatccgcggttgccggggccacgacggggcgatggtccaagtggagggacaccgtgtaacacctccacagtgcataagtacttgccccggttggagttgcctagaacggctagcgacatcaaaccttggaatggacgccgaggacgagataagcgtgacaatcaattggccccggggatcatcgagctcaggtatatgagcccccgttcctcagccctgcagaatgagtgcatttctacttcgtactcattatttcctcgattgctgacacctttacaataaaccaagatctcgctttcattacttttccctccatcaactcgtggaccatcaccacttcaactctacttagatggcggttgtctttatctctcactgtccccaacggcttcattggcattcttatactatatctctgtgtcaggccattcgcagagctagtagaaaaagtacccggacgtctaaacccgttcgctaagaacaattgtcgctgtccaagaaaacgtagtgacaaaccaagaacaagaacaatgtcaatcgaaatcgtcccgctcgttgagaacgacatacctgatgctgtaaactgtgtgcagaaagcgtttgccgatgatccctattttcgctgggcgtttgatgatccatccaaggtatgagatatcttattttgcgatgtacccaaacgacttcgttgtggctgtgagaaaaacatacaaaaagaaataaaatcatgaaacaaaacgaagtcgatgtcgaaccaagtaataacagggtttgacagttcaacatccaacgaaacgcagcctccctcgctgcccatttccaatatggtatcaactgcgactgccccatttctgtcgcgaagatcactcgcgctgcaaatgaaagcaagagcgatgacgacattcgcataccagttggtactgtggttggggttgcctggtggtactcaccacaagcgccttccatgccagaaacctggtctgtttgggcacaaggctggcttctttccttccgacagcttatgaacaatatccgcttccttggtcgtggtggtctgaatgtgcaccggtattggatttggaagcaagtgcagcaaactgcacacgatgccatttggcaggacccccgcgggtactacttttgcaatgtcgtctgcgtcgcttcggaggcgcgtggtatgggagtgggaaagatgctcatggataatgtcatggacaaggccgaccgggagaatatgccgtgctatctcgagagctccaaggggtatccaaacgtgggtatttatgaaagaatgggctttgaactagtcaaggagattgaatgtgtggacggaggggatgtttgcaaggtgtgccctcttggctgtaattttccatgtcaaatgactgacgcactaatccagttatattgcatgattcgcaaacccaagtccaaagaaaaaggctgtgataaattttccgatactgttcattaacacagatacacagggagattgagtgacatggctcgattagtatttgaatcaagcatttcggtgactgtcatctttgattgctttaacaacgtgagcgagatgatggaaataatcgaatatagcttttctaaagcttcgttttcccagagctaatttcttttccaatcggcgtctcttttgtcttgggtttcggtcggggaatgccacaaccggttatgaaggcctctttcactttctactgcatctcagaagactttatctgagaattcattggcgctcaccgtcattttgtattaggaatatggcttgttttgctgctgtaaagacaaagttgagagcgagagaggcacatcaacaaccatctattttcataaatcgatctttccaagccatgggcgagggtgcaatgcctctgtagaaccctcggaccccaactggaaagcagtcgaatatgaatatccacttccgggtctgcctgaattaggcttcaatctctctcaggtcaacgcctattctcagagcatgagtgagcttctacacgtcgttcgatactgtcgacaaacgcctgtgaagtgatagcctaggtgagcgcttatgatgtctctatttttagaatcagttcaactatatacatatggaagacaaccttggaaggagacaggcctcagcccatgtcgcccttatgatcaagcccattttcctagcacccccatcagcaccagcccactgatgaaggaaataccaccggttagaacttttcctaactttgcattcaacatttcacctccctcaatgacccagtcacgcgcccacatatcaacgacaccaacccacaccagaataccagcagacagcgcgtccaatgttcctagtgcaatcaaagtgccccgcgaattaccattgaaggtgtgaagaacaccaagcccaatagccatgccaataggtgtgatcaaggcaaatgctagcgccatggacgctttgttagggaatatagctccggggagggttgcaatacgagcaccgagtgccaacccttcaaagaattgatggaacacaatcaccacaagaagtgtcttgtagaatgagtcaccagcaacgacaagggtgaggccaatcaaaatactgtggaacaggataccagcttccatgacaacgaccgaaaatttactgtcgggtccggtaaggtcgaacgagccgtgattgtgactaagagaagccaacgtggactgttgctgttgcgccgaagagtgttcatgctgtcccttctgctgagtttgctgagactcggacggtatggtttctgcggagatattcttgctgtggcgagcaacaataatccggtggccaatgtattccagcaagaaagcaatgaatatacctgccacgactaccgcggaggttgtggcttcgtactcgagttctcccaaacattcgttggtaaacatgaggttcgcatgtgtgtatagctaaggaaaagcagtcagcaagtgatacgtgtgtcaaagttgaaattgcttacatggatgaaacccgtggcgatgatgatgccagttccgaattgtttgatgacggtcgagattaccccattgatagaggcaaatggaagcttcatcaggagaataggggcaaagacaccaattgaactagtgacaaggacaacgaacaatgtgccaatcctcagagggatatcgtagtctcttgcttggacagtacacgttgaaccagtactagtttcctctgatgcacctgtactcgtgcagtgtctagaatagccaaagtcaataacgcctaaatttggaaggattattacaaacttactcgacgccagcgtggaagtggcagttttgtgaagcttcgcttgaggattcctcctggtcatcttcactgtcttcggtctcggtctcggattccgttccttctgcttgaatcaggacatcgtttccgtctccatccatgcagtatctttgaattttgtagtttagtatattgtcacaaatatgcgtacctgtggacttacgactggcttccgtgagagtgacacccagtgtattgtgctggtactccggttgtaggggtagatgaggccgaaaccagaacttcttggccatctccatcaatgcagtaaatgcttgagccatgagtatgacaaccagttacagatgatgattgtgctgatgttgttgctgtagctgcatatactctggcaatgcccagtgatagaaggaagggccgaaaaatgcgcatgatgaagctagtgctttacccttttgcaaataagaacgttgggattgaggttggaattaggatcgatgcaagaaacctgccacaagtgaggagttttcaatcaatggacactgggagcactccgctctaaaaagccgcataatatatgaaaaagcaccatacataggtgtctcacccccaaggttctcgatgccaagcggaagacctttccaccctttcgccaagagcaggcctgagcttgcgattcgggctttgtccggagaatatcgcccactaaacccttgtactctcaaggtacctcccgcccaagtgtcttggcgaccctccaccgagcctttgtcttggcatcaatctgagattttcagctctgattgctggagagcaagatttttagcgagaaaagcgctcgagtgagctctcaaggtcccctctcagcaggtcgcaccatctgtatattgagaaaaatggagaagacatcccactttctcttctagtgttgccttggattggatcgcaggcatagcgaaaatgcgcccaccaaaagccacacttggcaaatagttgagaaaaaccaaaatggtcgaatacggaagctttggggaacttcgtaaaaatggtataaaagctgctcctatcgtggatagaaacttacttctacaatttcaacttttcaatcaatccacctcgattatacgaaaatgcgcttcttgaatctcgttctctctgcagcagttgctgctgctctccccacccccgagagctccgaaggcaatcaatcccagcccttctctcagaatggacttgcaccttgggatgccggcgctgtgaatgaatttcccatccattcgagctgcaatgcaacccagcgtcgccagattgcgcaaggtcttaacgagactattgctattgccgaacatgctaagaaccatatcttgagatggggaaatgagagtacgatctacaagaagtttttcggtggtcgcccaaccatggaaaccatcggtgcattcgatgtcgtggtcaatggggataggaaagaccttttgttccgatgtgacaacccagatggaaattgcgacattgaaggtattggatcttgctctgtgttagcgatgacttactaaacatttgaactaaataggctatgccggacactggcgaggcgaaaatggcactcatgagacagtcatctgcgacttgagctaccaaacccgtcgttccctctcaactatgtgcggccttggatatacagtctcgcaatctgaaaccaataccttctgggctaccgatctcctgcaccgcctatatcatgttcctgccatcggacagaactgggtagaccatttcgcagacggatatgaagcggtcgttgacatggcgaagacgaatgcgacgctgtcaacccatgattcggagagccttcagtattttgcactagaggtatatgcttacgacattgctgtgccgggagttggctgtgcaggtgtccaacatacgcacgatgaagctgatgaagctgatgctcaaacaacatccgcggctgtgactagtcagtcaactcctactgcaacaaccaccgatgccccttcgacaacctcctcagtacctgcggtgagtcgctctctggttgcattgtggtgatcagaaactgatttgaatagaactgccatacacatgacggaggcgtgctccactgcacttgatatttcttacggtgaaatcactcaggcatcgagacaaagatcaaacattggcgggataatagtcctgacgtgaaggaaattgatgggtgatatatgatatcaggagagaggaaaggggttctatgggcccaaggcatcagcctcagcagatttacggattgtaatgtattatggtctatattattactgagcttatttgctacttactatgcgttgaataaataaacatgtatccaatttctacggtttgtatttggctctcgtggttttgtttattaagcatagtggatctaggggtaagaattttttcgcagtgagttgttgctatcttgacttcacccttgccttgcccctcatatcgtagcagctatcatttttgaggagttgttaggcttggggtaaactacatagtccatctttgataagtaatactggcctattagtgagtgagtggcgaggctgggttgcatactgaggtcgctatagatactaactggcatgatcatgaggtagttatactttgccggtattactctcaacatccgcctgatgtgtaaaaccccatagtaaaataaagtctaaagtctaataagaagcttaattggccgaagtatgacatttctctgtagttacttctccattattgtacatgatgcaggtgagcgattcttgagtatttgagtgccatccaaagatacttcgaggttcgtaggcaagtcaacgtcaatgctgcgagtgagccggcgaatgaatatatattcatgtgatcaatagtctctcaaatctcctatcatatttaaagggatttgggttggacgtacgtgtattttgttctacattctatgtttttataaggaacatcgtcaagatatatatcaataccattacggattagattattttgctccaacctaacatggcctatcatagaaaaacgcccaaggaaagtgatcaaaaaccacttctctatctcattgaacaaatctattgaattagttgtagccgaatataagaatttctagcttcctggtaagctttgatagagggagggctgtagacatctactcaacagtttgcccagaaatttggaaattagattatgttgatttatgactttatgatgctacttagtctactgcaggctgccggtgtgaattgtacaatgtcagccagcttgtaccgcctccaggatgtgacctacaatatcctccaggatgtgacctacaatatatgaaccatgccgggatagagacagcccgattttaaatacgcccctgtcgccctgtagtctgttctaccgagagataccaacaacagcgtttcctcaaatgctagtactagggtggagcccacacccaagtgggaaacagggttacaatgtcaaacagagcctatggagagaggacgtggaacaggggatcgcatgatcgaccgataagaatgccgttcgagcaaagatttaccaatggtagggttcttttgctgcaggggaatataatttacactataaggggcattggaatgcttgtagacacacgagatgccaatctaggggtgaaaaacaaccctcgagccaatgagggcattgtatccctacagaaatgattcagttcccccacagggtgttcctgaatgtacctaggaccctttaaaacaatccagattgctgttgccgtggagttgccccaaaacccgtccaggtgcgcttcaagaggaaaccaccactcatccatttttatctcaaaatatccttttgacgggcacacattcgcccctcgactatttaaataattatattccttattgtgataagtccgagtgatgagactgtcgcggtccgcctggactgggagtgcattccaggttgatacggcattgtttatgtacggcagtgtcccgactgttgccattcccgttgaggcaatcacaacaccagcacccaagaccaaagaaccacgcccagtaaaacgatccaagtctaaacgaaaaagcctgaagaggtcactgtccaagatcttttgatctgcgaactcgatatcctcccttcctagccacatttggctgatcgctatgagtttgcacggacttggagtgattggggcccaggtggccgcatcgatcaaaagcaacgacgagaaaatccctgacacgcccaagttcgcgcccccacgatgctccattacatcctcgcctggggctcacagccaggagtttgatccatcgattggtgcaaagccatgttcgcctttctatcctcattcaagtccaacaatctcacatgaacaactcaccttcgaaacaaagaacgccaatcggagaagccatatgagagatatcgaaagcctgggaccgtacgcgagctgccgaacggatagtccccggcgatcgaagttgtgggaggaagagaacaagccattgacatggctgcagaccctgaccaataaacaacgaatggcactgaaggcagtcgtggctgtggtaacagtggggactatgattgcgatagcattgggcatcactgcggcggtgggaggagcaggatggaaagccagtgctaaaaaaacggcggttggtgtatgagtgagttatctcttcgagtctctttcacctattgggttggatccaccgctgacaggacatgcaacttcaaggttcgacgttacttttgatccggggcgacgagcagcccgatcaccattcattgtgattcacttgccgagctctccgacctaaactaattactcttttctttcttgctgcttgaggatgttatggagaattggagtttaggagcatttgaggttatcgcactcgtccaggggcatgtcacattccgacatgaacaaaatcctacgggtaatgaattggacatgtcatgaactggccggaactgctgtatcatatccttagttatttctttttacccccctattcatttgaatacgacctgtgcatgagttgtcatttgtagctcttgaacttgaaaaatgggagcgaaaacgtaagctaggtcggaccgacctcgggactaagcgggatagtgtaaatccgacccgtgaccccactagcgctataaaagactgcaaacttttcggccccttcttccttttcttttcttcttcatcgaaaaaaagcaactgagcctgccacgaccattgtcctgtcttacgacatccccacgacgatgtgttgccttcggtcctacggacttcggtcttacgggactgatcggctcaggagatagatgatcctcgataggaagttcgtttcccctctgtgtcctcttcagtgagggcggtgggatttgaatgtcgaagacgggacacattccttcgcgtcaactctgttccagtagttgagagcgagagtaacgaccaacgcattgattcatgtgatggtttactattcatagaattacataggagaacggaagatatccaatccaaacaatgcataaatgctaccagtctcagagtcacagtgcaatgttcatgtaatgtcgagtgagctagacctaatactcggtattgacttgacatcactaggaatccatgccatatgctatccggtcgcacggtggtttaaccgaacgaaggacatggacaagatcgtccatatttgagtctgtttgggatgagtcgaacatgactatggcatcaattccgaacgacgagtgcaaatttgtcaatcaaaatgtcccggaccaaccaaggggcttgctcgatctctgaatgcccctacccaggtggtgatctcacccctctcaccctgcggaatgcagtatcaccgcatttttaggggattgcatggcagatgtttacgatctgaccacgatcgaggggtattctcttacttgttggtattattttcattccttacgacattctaatggtattaccctcgccttggcctcatgtcaggatgcagttcctgttgatgcaacggcattcccgcctgcttgttgagctggcgatcatgaatgcgacgaaactactaaaggtgtgaaaatttcctgacgatggattactattcattgcttcaaaggagaatattccatcaatcgagccattcttttatcccgctccagtagcactcgtttccagtcactcttttaactcctacgcgcaagagcatacgtctttttccagtaacatcccccaagcaacgcaatcatgaagggctttatcggtggaatccctgtggcattgctggcagttgctgcccaggccaagtttgctgaacgtgtatgtcatcctactctcaatatgccgatcctccagctaacccaatgtatagcacgagcatgacttccatccccaggctggtgggactgctatcggtggaccttcaggcaatgatgatttccgcccccagactggtgctaccgccgtcaatggacattctggccatggtgacttccatccccaggctggcggtaccgcgatcggtgggccttctgggaatgatggcgacgatggctttgtcagcccctactctgccaatatcaagaccgataccaaggtgaaccagtggaacaaggatgaccactccatcaagctgaagcacaccgatgtgtatccccgccctcccgtggcccctgtgccgtttggccacccgggtgtccccagcggaccccaggtccctggaatgggacctttcggcaagggaaagcgtggtgctccaggtggaactgcaatcggcggcccctcaggcaatgatgagggacagagctttgatatgtctgtgactggtattttcaacaccgaggtcgaggatgtcaacaaggatgatcattccatcgatgtcaagaacaagcatgtccaccctgttgccgttgtgcaccctccccctcaattcaatggaccccctcgtggcggctaccgtggtcctgctggtccgccttccgctggcttcaacactcctccaggggccttcgggaagcgcttcgggcctcctcacgcaggtggcaccgccattggcggcccctctggcaacgatggtggacagagtttcagcgctccgacttacattcagaccgacactaacgtcaaggagcacaacgaggacgaccattctatcaagctgaaacatgaggatatctacccacgtcctcatggccatggcttcgttcccttccgtcgctccgagaaccatggacctcctggtcacggcggggctccacctccgggtcacttcgagcctcacgctgagcctcatttcgagcctcacacggagtctcacttcgagcctcactccgagccccactacgagcctcacccggaacctcacttcgagaatcaccctgagccacacttcgagaaccacccggaacctcactatgcgcctcattacagccccagctatgagcctcactatgagccccacaccacagtggagcatgagcttacttcgttgaaaaataacaacaacggcccctcggctggcagtatcgcttttggtcgccgcgggttccctggcggcccgggtggtcctggtggacctcgtggccctggtnnnnnnnnnnnnnnnnnnnnnnnnnnnnnnnnnnnnnnnnnnnnnnnnnnnnnnnnnnnnnnnnnnnnnnnnnnnnnnnnnnnnnnnnnnnnnnnnnnnnnnnnnnnnnnnnnnnnnnnnnnnnnnnnnnnnnnnnnnnnnnnnnnnnnnnnnnnnnnnnnnnnnnnnnnnnnnnnnnnnnnnnnnnnnnnnnnnnnnnnnnnnnnnnnnnnnnnnnnnnnnnnnnnnnnnnnnnnnnnnnnnnnnnnnnnnnnnnnnnnnnnnnnnnnnnnnnnnnnnnnnnnnnnnnnnnnnnnnnnnnnnnnnnnnnnnnnnnnnnnnnnnnnnnnnnnnnnnnnnnnnnnnnnnnnnnnnnnnnnnnnnnnnnnnnnnnnnnnnnnnnnnnnnnnnnnnnnnnnnnnnnnnnnnnnnnnnnnnnnnnnnnnnnnnnnnnnnnnnnnnnnnnnnnnnnnnnnnnnnnnnnnnnnnnnnnnnnnnnnnnnnnnnnnnnnnnnnnnnnnnnnnnnnnnnnnnnnnnnnnnnnnnnnnnnnnnnnnnnnnnnnnnnnnnnnnnnnnnnnnnnnnnnnnnnnnnnnnnnnnnnnnnnnnnnnnnnnnnnnnnnnnnnnnnnnnnnnnnnnnnnnnnnnnnnngacccaccccgagccccacgttgagaaccaccccgagcctcactacgagcctcactacagccccagctacgagcctcactacgagcctcacactacactcgattatgagttgacttccttgaagaacaacaataatggtccttccgctggaagcatcgcttttggtcgtcgcgcgtatgcccctaccccggagaccagcgttggcggtggtaccgcaatcggagggccttctggcaatgacggtggtagcggtttctccactccgactaacattgatcttaccaccggtgtgaacgagcataacgaggacaaccatgccatcaagggtgacttcacccacgtccaccccgatgctcccgctgagtactcccgtgaggatcatgttgatgctcctgagtgcgctgcccaggtgcacgaggttgttcacaccgtcaccaagacccagtacaagactgctgaggcgacgcacatggcctaccagtcggcgcccgttgtggatactgatccgttctccggctacgctcctcaggagtccttcacccccgttccctacgccgactatccccagcactctgccggagctgacccctacgcctctcccgctcctgctccttccaactttgtttccggccacccttcctaccccgtgcccgcgggtgagtccgtggtccgagcgcatgcgcctatggccacccccgttgcaagttctagcgccgactacgaaaactaccctcagcaccctgtaggggctgatccctacgccgcctcagcttccgccccctacaactatgcttcccagcgtccctcgtactcgaagatcgccgtgcatgttcctatggctacccccgcctccaacgccgcaccgtccaatagcatgggcaagatgatccctactggtgcctccgctgagcagaaggcttctccctcgtcctccgcgtcggcttctgtatctcatggaatcatgttccagggtaacgctgctcgcgtttctggaggcattgtctctgccgctgctgctgttatgggtgtccttgccttcattctatagatcgttggccgtcggtttgagctgcttcgtgcattattagtcctcgtcattcgttattacgcgcttcatgtttccttcaaaccttcattttcgtacaacgttactgtaccttatccattggcccagcctttaatgacgaatatttccttcagaaagccacagatttaccacactcaagcattgactcttggtttctttttccgactcgtagcattcgttctgtaactattagcgaagcccacgcccatgttttgactgaccgattgataagaaaccatctatcaactatagcatttcatgcatgatcagtggaacactcaaccccaacgaacatctcatttgcggttcgtgatcccgaacacctatgtacctatgtaggtagactccaatagtgtgggtcaattcgtcttgataacaagctggcatttgggttcgccactccgaatcctcaagctcaatgacaccaaaacccacctgaacttgaattccaggatattgaccctcaatccaacaatttccggtattgcatattaatcaacggcattttcttaatttatttcttgtatttcttctctgtgcttgataccaacgaccaattaatacccatgtgacatcattgcccatcatctctagatgatctccaaccgttgtgacatcagtacgagtggtacaggacctagcctccagaacaaatataaaagggtaccagtatagtctgatctaattgtatcaaaccacgctactgcaacccaaatacttcattcatccctcgatatctcctccactggacatcaaaccgcttcgaatccaacaatcacttatatctccaaaatggctcagcaaaacccccaccaaggcggtagcctctctgaaatggccgcccaaggcacacgcattcccaatgacgccggcatgatgaataccatcccctcggtgccacgcccagaccagcgcgccgagcacttcggcttcgacaacggaggtatcgccgagccctcaacagcgatggccgctgacaacactaccgacctgccacgttcgacccgggatgtaggtcagaccggcgaagtcatcagcggcacaggcaactccatgccggccggcattgaggccaagcatgcctacatgggctccaataaccacgctggccatggtgatactcgcgatctcaaacattccaagtataaccggagtgagtttgagcgctatcaggaggagtagagggtctcgtcaaccattggcgtgacattttcgtttttcaaaatgatggctggcttccttggcctcgtgctatccggtgtatgatgttatgaatggcgtttgtcatatgtaaaacaattcaataccattgaacaaatcccattagactttctgagtagagtgtgctattcaatgattagattcgtagcctgggctggtcgggcccaataaaccctttatagagttcttcgagaacatctcgcttcctcttgcgatcggcttgagctgcttgctcggtttcagtaggttcgccttccggatcttgagacacccatgaccggatcgttccatcgccgtgcgcagagaacatctctatcccttctccagaggcaccattccctcgccaggcaagatcattgatacgcccagcgctcaaagcactcgaccgaccgcggacattctgtgacccagccatgagacccggcacgcggagacgcttaatgaatgtcccctcgcggagctcgaacatgaaaatctcaccacgatcatcctgctcattgaaattcggccacagtagtgtttcatgccctggattcatggtgcctttcggcactattaacggtgctcgttcagctaggtgcgaggaagagctattacggactcgagggccaaaatgaacaagtgtattggcgcctgttgcagagtcccagactcgaattcgggaatcctgtcctgtcgtcactatgtgactgccattagaggtccaccgtacgccggttacaggcccattgtgggcacgggcatgccgggagaaggctggacgactctcgtatgagatcggtgccgatccagttcctggggccaccagtcccactgggtcgtccatgtccagggtagcgatggcagaattgtgacctccgcgacgcacgtcgaatatgatcacccggttgtcaaccgatgcagaggctaagagatgcggccgatgaggtgcccatgctactgataagactgcgccgttgtgtcccggtagaccttgtgtcgatagtccagatcgtaagtctactagccggaccgaccggtcagacgtgcctactgcgacaagcagtgttgacccaggctgagatgagaacgagtgtgaatatggcgtacagtctaggttgaatgtatgtatcggtgtgatagagggcgattgtagcgccgatagctttaatgtaccatcgtgtgccgtcgagaagatcgtcgatgggacgggatcaaacgggtagatcgacagggaggtaatcgcatgtgtatgcgcgtcggcgtgagaggatttgctaacggacgcgcaggattgatggacgtgttcgagttctgagcctcttgattcaaggtcccagagatgaatcgatgggtcggcacctcccgatatcatactgccctcatgttagattgactgacacccgtcagatgctaagcggtggcacacgcactatcggccctcaaactgatcgacagcgagacagttcacaccggatttgtgagcaaatacctccgctgtggcatctagctcttgatctagaggcgccacatcgtcttcggaccggtccgttggcgcagctgctctgcggctggaaaaccgtatgcccggagcgggctcaatgttgtgcactagcctggttgtttgagcaacatggaattcatttggagttacagacccaagggctctgttgagtatataggaattcatgcattcatcagcgctggtgcttttgcatggagaagtcgagagcactcgatggtgctatgcttcaccgggttaaagttgtgccggcgcatttcccgaatttggccgctgaagatcctcgatctttactcctcactatccgctgcacaccactgtttgatttgccaaaccttgattggtcttcctggcaaacctcaagtatgtctgttgctaggtcactcagcttggatgaggacagttctgtcgagcaactcgaagataagcaagaagcaccgggcgataagccttcaaggcatataaaacgccgcgccaacgtctatgatgcggtagctggtatgttttccgatgcttgccgagcgtgttataccaagcagaaaacatatctaattgcaactaggtcgcgtcaacccccgtggtgtcaacgcaccccgtcacattgcttccctataccgcgacacaacctcatcaagcgttcgaagtttgcgtccagaggagcttctctatcgcaatcagaacattccagtggaatcgatcgaggagaaaacctacttcgcgcatgagaatcttccctctgaccaagctctcccgaactctgagctccttgagacgatacatgcatatgcggccgactactacgaatacgctacggcggataacggcaaagatgaccatcaaaccatggacgagacagcactacttgcatttgggatcctgattgaagagatggccaaggaggaactgggtgaaaccggggatctggctctggttgaaggagaagagctgtcggaggaagaggacgataagacgggcctcgagagcgacaccacagctaaatcagcagcacgaaggaaacgatcaaacagtattgtccgtcagagatcaaaaagacgcaaattggctcgttctgattctgttacaaccgatttggacaccgaaattgacgaaagacggtgactggatgacgttgtcagactgcacctatttctccgcggccgaatcctctcggaggcttttgatgcttgcagctgtatcaagctatgcgcgatcttgcatagctacagtaaaacctcttgaaagggaatcggatcaccctatgcactaccatggcacagccacgctgcacatggtatcggcacatatcccatcagcgaggcaaccaaatcagacttcaaagactctgatatgtaagacgatagccttgctgcgcctgcctgtgcgcctcccgctacaccgaatgtctttaatggagctatacacagaatgatagctccgaggagagaacttgcggtggttaaatcggccaatatttagccggctggcaacaatctcgagatccctccctcgtcgaaccaaaataccatcttggttatgccgtgcatcctgcatgagcttcagttcaattatggctgacactggggcgacatctggttgcgagacctcgtttctgtagcaggatcttgtctcacttgacacgtctaacccaagtagggtcttccaggaatggctcttcctagaggttattacgaattttatatagtcctgcgtgaatctagtcttgcgctgactcccaacaaggctatctttagcagcgttagtaatctctatagtcatcattctacaaatgtgttcaagcaaaataaaaatagttgtacagagaaacccttggaatagaaagggtaagcaatgtcaaatgttaagttgagtttccatgtatggtcttccaaccttaggcaggttgtgttgcgtgacaggtaagcctccagttctctcaggtgggctgctgactttgaactcatccatcactgcgcctccaccaatgcttagccatctcatacttgtccaatgagtggacgctggattgataagctttttcgaagttatttgacagtgcgtgaaatatggtacgtggcttttagaatgttccacctggacaaggcccaggaccatttagatgagactactgacgcgccactaggccaaattaaccaaaagcgataaacaggatttgattttgactcatctccgcgccactagaacctgtcacacgctcaaggatttagagaagtcgctaccctcggttgcatccatcaatggtatccaggtcaaggaatacatccaagctttaaccgacgagggtcaactgcgagttgagaagatcggcagtgggaactggtactggagtttcagcagtgacgaaaagcacgcacgcgaccgccagttggcccgggtgactggtgaggtggagaaagtccggaagtcttgcgccgatgcagaagcggctttggccgctgaaaccatgcgccgaggggaggagacagatgacgagcacgaaagggaatccctaatggccaaaagaaccgagcttcaggtggtaatcgatcgggtacggactacggaggcccaactctccggacccctcaattcgctcagcagcaagggtgtgaagcaggtccaagaggagttagcggggttccaacagcaggcactgcagtggacagataatatctacatgttagagcagtatttgcgcaaattagtgggcggagatcgacaactcattgaaggtgtcttgcgggaatgttatggagacgagtacgtggacggagagggtcttgctgaactaggataggataaagatttgaggaaaaaagcttaggtttgcttagcacatggcgaccttggggaaattatgtgaaacttgaaaccaattcagtctttagttcttcgtgatcatcatataaatcatcgagaaaaaggagaaataaaactagttgagccactcgggacaccaagagaagcttgaccgtgcgacacgcgaatcgaaagccccgtctagttcgttctccgcctctcggaggcttatcgcgaactcccgaccctctctcctccctcttctctttcttctcttctattgtcacatcttctcttattctccccccctttcgactactataaacccctccgatcgtctatcaaagttggctcctgcgttctcgagtcccacattcctcccgatctcgcgccatctcctgttgcgcctttcaccctctctccccggcccccgacccccccgacccccgttctagactctcgactacagcacagtatcccgcgatactgagccatctgtccctttcaaccctgtcattccccacgaaaaatatccactcctttatcttgcgatctgaccttgcctcctgatacgctgcgagttcttggcgggggtactgtcgaaatcctgcctcgcgcttcgatgtcacaagaaacaatgtggtgcagtggccctctatcataatccccattcctttctttggactcgggaaatctctcgcgcgtggacaaggatacattccgtgggcctttggaaatcagaccgtgtttagtgcattggtcctggacgccagacccttcgaaaggattgatcttccttgtgtcgcttgattggatttcttgacttaggctgagtgcctcctggtctgtttgactattccccgccattccgtactgcagagaataccggcgcgtgtctccgtccgatcggcgccaaatcggtcgcagtttaccatccccaccatccctctcacccctgccacgttttcttgtatagatgcagtaaacattggctgtgtgtcatgtccgccaaccctccaacccaacctacgttgccggccagtcggaatcgcaactctttcctatccaaatttcgctccccgctcggtcaaagaaatcgaggcatcaccgacttctatatcgatccagatgacccatggcgctcttatttccccggtgatgtcatcaaaggtaccgtcgttgtgaccgttgtacgacccgttcgcatcacgcatatagtcgtatgtctccacggctatgtcaaggtgttcaagaatgcgattccggcaggagagacaacacccgacttgggattcttaggaccagggcggggtcgacgaggtgcagaatacatgggcaatgggttagcgaccttgttcgaggatgagcttgttctctgtggcgatggacgcttgaaggagggcatctacaagtttcgtttcgaaatggggcttcctccttatgcgcttcctagcagcatcaacgtgcgtttgctgatgcgacctctcatacttaaatatgctaatcaaatgggcaactgcagtttgaacgtggaactatcggctactcgcttacctctacccttacccgaccgactaccatgaaccctaccctcacatgtagaagacgggtcaatcttttggaaaatatcgacatcgcacccttccctgcacccagggctcgcatagttaccttggaaccggtatcgaggcgctcaaaacagaggggaaaagcaaagtcaacaagttcagacgcaaccgcagggccggatacatcctcggtcgatacccctattagtggcgcggcaccctccgtagataccagaccaccgctgagcccctcaccaagcaatgtcagctcatctagccggcctagcgaaagcagtcagagctttcgaatcgccagcgatcccagttcatccgcaagcacgagtggaaaaaatagcgagggtcgcagtgtgaccccatctgtgtccgataaaaccatcaccgcaaaggctgagcttctgcgcgccggcgtgctccctggcgataccctacccatcacagtcacgatcaaccattgtaaacaagtgcgcagtgcgcatggaattatggtcacattataccgtcaaggtcgcattgatcttcatcctgcaattccaatcggtagtacggcggccgggaaaaagccggtatacgaagactgctatccgcggtcacgaacgggacttggaggacttaccttgggaacaagtcggacaagcagcacttttcgtaaagatttgtcgcagacttttgccccgctgatcgttgatccaagcaccatgactgcagttgtaaagacttccattcgaatacccgaagacgcatttccaactattacacgagtaccaggagccatgatcaattttcggtactacgtggaggttgtaacagacctacgaggcaaaatcacttcaccagatcgcttcatcccgcgtttcaatatggtctccggtgggactacgttttcacctagcggccaggccctcaatccagccgattcgaacggcgttactgccaactgggcgggcaatatcttggacacagatgcaatccgtcgtgagaaaggtgtgatctcggtggcctttgaggtcgtggttgggacgcgtgattcacaacgagggaaagcgacgaaacgtacatcatctacagctggcgactcgaccaagtcacaaacggcgcctcctgcttctgcaattctacttaaccctgttgatggggaggagtggccagagatcagtccaatgcctaattcccatggcgaataccatggcgattaccatagcgactaccatggtgaatacgggacagaggaggggtatttcccagaggagacggattgggcagagtatcctgaagaatacaatgaaaatttccagccaatggaccctatggttgcgcccgcagaagtcgaggagcctgttgacgagaaaacacgggtacgacgtcacgaagaagctctcttacctagtcagccgcctgaggaagatgaggcaggcccatctacagtatcaatggaggtcccgaccgcgccggttttgccagatgatcatcatcttcaagactaccagcatgtgccttcaccagatacaagcggggggccgcatactgttcgctctgcggaatccctgcagactgttgttgcgaacggcgctgggcccagcgagccacgtacttcaggcgatgataaacaagagcttgagcgtcaccgactccagcagcaggcgagtgcaccgcaagacgagcccagtaaccaggaacccagcgccgggcccagtgcgccagtctttgatgaggatgatcagctagtcggtgggacggcgcatgcagacgagtcgttgcctcggtaccagcgatgatgttgttatgtacatttgcatttacgggatattctggaagataccactattcgcatcatttatgaaacggcgctaaaggcgttgaaatctgtatcatacatttatttgtcaaaatcgattctcaaatctcacataaaatgtttcaatcctctactgtcatcaattgtttggacatccagaattctgtctaggatttgtaaaacgcccttatctcccggctacgggcttggcatccgcttagcgatacctggggtgacttcagcctggcccctggtcaatctccttttccctcacaaaaccccgtctgcttttccaattttcacaatggccttcaaaagcggctcgttcgcgactttcatgattgtctgccgtaagtccatcgcatcgcgagtccccggactccaacggcaaagaggccacgagactgtaataaactaactcagtctgcccaaccagcgacctgtttcttcttgggcattatcttctccctcttcccttacgactacccgatcttgtggtccacagtgttgacacctaccgcacactatgactacctcgaagcgcatctccgcttcctgcacgcctcgcccccgctcatcccacgcatcctgcacatcgtaattttcgtcggcctagccggcctcctcacgaagctctacaagccctccgaatcaaacatgctcttcgacggcgcctcgctggttctctacatgtgcggcgtgacagtctacatcgccaacatcgtcaagggtctgcgcctcgcctctgccggccggtacggcgccgagctggctacctccaccgacgagaatgagcagatccttggtcgcgaggactcgctcaaggttctttccgctagcaatactattctggccctcgtcctcgttggcatcctggtcctgcaggctgggcagtggtacgcggagcgcaaggatgcgcaggaagatgaatcgtttgctactagcaagaagactgagaaggagtctggcgaggcgacggctactacttccggtgcgtcgactgcgattgctgggaagtctggtcggcagggaagccagcgtaagaagagcaattaattgatgtctgttcttaattgtttctctttcttccgttcgtctttgccatagggatatggatactaggtgtgaagtggcgcgcctgagtacttgctttgcttggtagctattgttgtctttctagtcgcctacgcagacgggtatttactgtcgcaaagaaaatcattgaagacgtcttttttttttcttaattgccgggggttcaatgtaattcgactttcgtctatgtacatatgatccataaatatagtatggcacgttcacatagcaacaaaataatatatgaaaatgtatgaaaatgtatggatatggcatgatatgcatccgagagtatggacagaacaaaaaagatggacggatgatcatagatgcatgtaatgtggacagatggtatggcaccgcagaaggggaatcattgcgcaggtcgtgaaagatggtgtgtggtatcatatcatgcatgagaaatttaagttcaacggaatgagaatgggctgcgaggcagatccggtgagcgcggactcagtgccttggcgaacaattcttcgccggaatcattgctcggggtgcgcgtgattgaacccatggctgcatccattgctgtaaacccagtgggctcgcttgtctgttgagtctcctggaggaagtcaggcgggaagagtgcaacgggtttcagtgattcggggcccgaaagattaatgtgagagcttggggtaggggtgggattggtgttaggcgttggcatagaatgtaggtggctattagcgatactgctgaacgagctgaaagaggaaactgcaacatcaggcgattgcggggaaagaagcgatgctccgtgagaacctagtcctagtcagtaagcttctgggacatgtaagtcggtgtagaaatacataccacctcctgacagatccttgtcgctggtctgcaacttgagtcccttaagtttgtcactcagattcctgccactgactggtgacaccggtgtggctggatacacggaggatgagttcgcggaatcatggttaccgtcaaccgagtcgacagcacgcgagcctattccaaagttcaactcaatccattccttctcctgaatggccataagcagcgcgattccttcggcgttgttgcgtgattcatcctcaatctccttttcaagaacttgcaggcgcttcttcgcccagatagtatgcaaaacgccctttttgccagctgtgcgtcccgtggcgcccaatgcaggagggaaaatggcggggagaggattaagctggaaggtgtcttggggccttttaggggcaggcacacctgtcggcgagggtttgggttcatacgacagagtgacaatgggaggaatggtagtatagggagggagcaagaagtagcaacggcgcaggctgtcactcggtctttcatcggcgggcatcgtggcagttttgccggcccatgagacatgccacgacccctccatcgcagatcgggtcggatcgtcgtcctcccactcaatcatcaaaattttagtgccatcattagacctgcccgcctcgaactcaaatcgagccagcgccattaacgaaaggcccccatccttgaggcctggagaggtttctagctcagcgaattcgctatcaggggtgaacatgggtggtgcttgagccatggcagtggaggctgtcgggcgcgtacttggggaacttgagatccggactagaaaatgcgggtgggctctggcgaaatcacgaggggcgggatgggaaaggaagagtgcgctggacaagatacagacggcggatgggcggagtggggaatgactgggcgggggttgttacgactcggtgatcacgggatcgtaggaagaaagcacctaggcaggtaaactcggtattaattgtcaaaggccttgccgtgtcggggttgctggagtttcatgtattgctgggatgcaaagttggagcagggggtctattggttcctctaattttagaaccgcggcttggcatttatgcaaacatcccagcattgtacaggatggctttgcaacactggattcatctatgtaatgattttcagatgactccagtataatgtttatattattaaggtagtctccaaattctcaacttgttatgatgttgcttggatggtcgtcctccaaaaaccaagttggcaacagactattgtcttttgcttcttcttcttcttcttcttcttcttgtcgaaggaaaagctggaatgccagaaaaaaagagagatgtttggtttgtctttggacaagtctcaatcaaagaagttgccgaagtttaaataaaccgacaactgaacccaaagagattgaaggtataacaattctcttgtatggacttaaactcatgatgtgattgctactgccttataggagcaagaaaaataagcaaaaggacaaacattggcaaggcataaggtgagatctatattgagcggtgatataagttagtatatcataggaagtggataggatggcttagcaacttctttgaccgaggacgacttctaaagatagaaacagaaccgacaacaagtctaaagtacaagcgccaatagtcaaatgtcagatagtgctactgactccaaggtaaacattgagaaagttcatcaaggaatacaatacccacgttttcgtatgaagacaggtccagtatgatacagtatcatacaaataaacaacaagatgaggggatgaggtagcaggccatgaggaacaggcatggatagtgtgaaagccctatgcaaggccgggatcaacaaggttcgtatggggtcgatgggaaaggccatgcagtggcactttgctcaaggcggcaagatatgcgaacagaagcagcatcaagggatattgcgttctaaaattaaccctaagcttgtgatggggagcttcggccttaaaaagagctcaggcggagtgccctgattggcaaggatccaggtatttgcggtcagctgaatcgaagtttggcttcttggtgcgaagtgcatgagggaaataggaaatcggccaaggcttttcgtgattgccgctagatatccttggttgtcggagattcgtatccataaaatgtgtgatcgtcgagagaaacgggcgtctaaggcgacggcgaggttcaaaaatagaagaagtaggcgctactaagagctattattggaagtcggagcatggtctcgatgatgatcagtagagtgcatgaggctctcgtagcttttcattggaagagatatatagttcgtggctaagaaacacggacctggatttacctaggtggagcacaggcagttatggaagccatacagacctgatattaatttgaggaacatatcgttgcttgatctctggttcgaagctttcgagtattgtgagcaactattatagtgtatacacaagatgatcagaatgaaggttgaacgagagcgtggatctgcttgtatatctaatgcgcttgcacctaacatacatcgatattcaagcatactctacacgacgttgggtgctaaaaatatcacatccctgttcatattgagctaaaaaaaaagcaggaaatggaagtggcatcagttctatgaatagaacgcggtggtacagaaatagcacacgggacatcacaccgcataggaatatgcatacccctccttccctcaatgttcctcctgaacatgattggtcttgcatatgatgagccctcgcaagtctaatttgttgtacagcagccacgcaaaatcataagatagggactgtgattatttgcccctctttataatattacgggtgttactcgtggcagggaccgagttcgtaggtaaatggtaatctataccaattttactaggcagtctgtgacttgaactgagtaaatcaagtcctatctggccgactgattagaaacagctcttctttctatttatggataacaatgcttgtacttgcataaaaaagagatcacaccgatttgttgccttggcgcgaagaaaatgtcacctgggtcgaatgttccttgagtgccatgcgagagtcattctcagctaaaaataagccgtcggctcaccacccctgttgaaaagaaatgaccccaacctcatcacatcttctacatacatccgatgtagaccaattagcaaccagccacattagtgcccaagcgctggtggggcaactttgaatccccactgttccattaatttgttgtccaaaataggtatagcgccggcgcttaactgcatttaccacttcagtgcccctccttcattaatatcgctgattggtcagaatgccagggatgtgagcggtatgtcatttttggttctgggtcctgtgtgatgatgcttcgaggaagaaccaatataaacatctaagaggatcaggaaaattaaagatcatattctcgcagagcaaagaaactctatatcttaaaaaacaggagtcatcagtccaatatggaccttcgaatgttgttcgtgtaatttgtagttgttttttcctttcttagcaggtattattggtttgtactactctcccggccacctaggtgttacccatgcctcttttacacgttaaattagagaatgagacattgacggttccatatctcaggggcaaccttaaaacaactaatggattaaagagcaacttgaccccggtcacatttcttcagcgacaacttgaaacacgggaggcactgtatggcccaatcagtggcgttattatcactatcacgccccagtcgtcaacatcacaaatgcatccggtgcttgtgttttccgaatcaaatgggagacctcgtattctgcgtgcttactggacagtttatcaaatgcagagctgtaaactctcgttgactgcatgaatagtgaataaaacgtgtgatcttccgcattagtgtcacgatgtacatttgtgtatgccaatactgccagtacgctgtaatattacttcaagtatgtaattagtattgtaacggattaatcttttgcatgttactcagtattacttgggcatatccgagtagagcgaggagtaataagcaaatcagactaaagcccgatttgatttgactgggccctatcattgtataagattcaatattccctttgtttgaaatgaagccgcatgagctagatctctttcgataacatcgacggacatatgcctgctgtgaatctcggtttacattccaactgtgtagcgtccgatcaatcgagtcaacaaattaagctgtgaaaatccgtatagaatccttcgactaccagatatgttatcggtatactccgtaataatggggccgatggacttgctcagcctcgtccagatcctttgtccaaaaataggaaaccaagcgccactgtagtaagatatgctctatggtgtacatgaaagacgtgcttctcgtgttcacgcaatatcaagacttaggcattggcacccaagaaaagggttggcagtactttcgtatattgaatgaggctcatacagatcgactattgcatgggtgacacgtggtgaaatgcagggtagttgaaatgggagtagcggcacccgagaatatggatagcgccaacacaacgcgcgtgttcaaactgtatctagcaaaattgttgtcgattgttaccggggtcattcgccaaggtctgccatccatgtctctcgtgtggtcaaagcggacgttcgtcgagtatcaccctatcccatcaagaatccagtgctggttaagcagctaaagccggagatttaatacccaattccttgtcccgattggacggtgtctaagtaatgtgacgtgttcaacaattcaagctaatatgacgacacgtcgtaggtagacttgatagactgggggcagagaatgcaattggctcaggaatggtcctgaggtcagtctctacgtagatacgaaggcagagaatggaaagaacctttcagttcagtgagttataatgggaataaattgacgatggtagacagagtaaataatacacaaaataagcttcgactatcaaagcactaaccaggcgcaaagcatcagatgcaattgtcggtgtgaggaagggtcagaaaaaatcgtgttcccaagccaccgcaaaacgtattcttcgaattaccacttgaaaggcaggacgacacggtaccaagaaacataagcaagtaagacaataaagcaccgggcttatagtgtatgatttttgaacaaaagaaaatgcgctctcaacgccgaatccagcccccacgctaaaaccaccgactagcaaaatgcatgaatcaaacagtaaaacccgtaagcccagattgtcagtcgacttccttggcttcgcgacacttgcgccgctttccctttggcggtgcttcaagctgagtgcgcttgtaggtcaccgtgcgcgtgacaacctgcttcacgctgacaggcttcgcactgcggggcgaatcataatagcgtagcgtccagtctgacggcgagaatggcgaccgaagagtcgttgcactccggggtgttgcgctccggggtattgcgctccggggtgagtccgcgttcggcgagaacttcagcgacgactggatacgaagtcggcgaccatggaaattctttctggatggtgccgctgagtttggggtcggtggtggcagagatatggtcggcgatctgaccgaatcgctaaatgtagactcactgattgcgctcgcgggttgagaggtgggcgatgtagcagtggaggggttgtcaccaatgtacttgggaaaaccgagactagcactcataggaccggtgaagactggtgtgagagccttgaggaaatccgtgtatgctgctggaggtgtaataggagttgattgatcctcctgcttgatgtagtcggaaacactggatgtagagccattgtgaagttgcgatgggtaaaccgcgctctttggcgtcttgagaggaggaagaatgggtttgacgttcggcatcttgaccaggtcacaaagattttgagaaaccaagttctttcgaaagatgtgtgagagcaaaaaaaggtgggctgaagtaggtagagagagatgtgatggggtaaggccgcgggtgaagtagttgaaatagagcagacaagtcagggaagatgataatagaaatataagaccaaaaaaggacaatgcttgaagtaatagcagagagaccaagaatataagaaagtgctagccagcagcgaaacgaaaaggatgcggagagactgttttatgtatctgagcaaggcagatagatgatcctggtattggggcgatacaggtaatttcacgtttgggactgtaaaataacgaggctgtaatatttggtggtaagttaccaaggcggaacaagggttcgaggccggacgggcagtcccagtgtggcagtgacttactatttgtgtgccgtcttaacgaggtccgaagaggatatcggcaatgtttgccaaagacaaattcaaggttgttttgttctcttgaaaatcgatgcaaagacggcaaccaaaaaaaaaaaattaagacttgaccgtcaaggtcaagaaacaagaaaatattcaggtgaactaaaagattgtgaaggatatctggggatcaaaccagcaccatgctttggtctttataactttctgtcttgctgttcctcggaccttctcctctatacccgctgcagaaatgcaaaatgcaggagcatcgctgacgcgcgccatctgaatcaaaagaccccttatgccatgtatcaggagccgccgcagagggcggttgttgtcctaggtgatgagctgcccttcaagccactgtttatcctgtactacgctctggttcgtccagttttgacgcgcgcagcttgcagctctgctggcggctcgctttaaggggtatctcgggttgagaattgaagacatcctattttgtctccagtatagtgcgctaaccgaaacaaccccttagttttgttgtgttttgagctggacgatcaagcagagaccctagtttgacattgagatttgaactctcggtccaatcattcatgtgttttaccagctctccaaagaaggttcctgtctccacagttcttcagcagctgcacgatattaataacctcgatcacttctatggggtgctatatctattaaaggggcattgtttacatttggcctactaacttgttgccaggggaagctccggacaacgaactcctctcggcggatacgtggtcacgtcttcaaaagatgtgaattgggttggtacatacgagaattataatatctggcgctgatagtaaagggattcaagacattcaagcctcaaacgccatgtctatatactttctcgccaaggttttgggctgaattggaaagacgatattgtgcatctattcaccactcgtccaagagaacagcacactgtcggttggaacgaccgatgaaacaacattttcgctttttcttgctaattaagcccacgccctataacttttcctcattaccgctgtggcattctcgcaaaagggaaggttggacttcttccttgatttacctatgttggtgaaacaatacgcgctttgcttcgtggataaaccaagagataactttgaaatcaacactgcaatatcattgtgcaggatccgaaacgatcaatattattttagttaattggctttacccttcatgcgtattgtcagtcagtgtagtagttagtgcattttagggtttcaaacatcgatgcgccctctccttcaaatatcaaagtccatactgagtttctacaaattggagaaaaaggtgaacttcgactgatacccacccggcagacaaaatgtctcagctcttgttatgctccgagagaaagctgcatacttagctcctcaggaaatgatcaagagtagttgagcaaatatctgccagctctaacctggaaatttttaacaggctttgcagtttgcagtctagtgtttggtctctaatattccagactaactactacctacatataggtatgtcttctgcgaagtgggtttaccaagctacaatgcactgagacatgcgagaagtaatattgatatgatatattttggattctgaccaaaatttgaaatatatacagacccaaatcaatgccacgtattgcgtccagaataagacgagaaaaaaacaccagcctatacatgataaacagaacataaagcaagattccagacaacaaattcgtttgcacacaaaacaataaagactagtcgcgaagtggggtatcttttaccatctgagccagcacggggatcaacctcgtgaaagatagaatcaaaaacaaaaagaagacatgctcctcaaataaggagatagtgccaattattccgcttcatgatgtccctccagtggacttgttgcttcttgatttcccgtccacccatagtggtgccagcgccagaggtggagttcgagccgtcaagcctggaaatcggactggtaagcgaggagttgtaggggttctctccagatgagatttgacaggagttataagggtcgtccgtcaggcgccaaacctctttcaggaggcggtacatgcgtccgaagctaccgaggttcccatggtcacccagcgcagcagcgcgatcagcgatcacagatcggaaggagctcgatgatttggaaaacaagccggtcataagcagtggccagacaagagagcgatcgtagccatggggaccggcaggaataaatcggagcccgtctatcactgcagtgatcaagctctcgtctacttggttgtgatcaaagccgggtgcgatgctggaaagataaatctgagctgcaatccggaagatgtgagtcatggtctttgtcagggcctcagggcgaatggctccagttgtaggtgagaatgcgttctccagtgtgggatcggcgggctttgtgtgctcgagttgttccgccagtgctttactatgaaaagagacggccgagtcaccgatgcgaccttcgctctttagagagtctaggcaagcaacctcggagataagatacatgacccggtcatcgcatcccatcaattcgcataagccagaggatgctccacccaagtgctttgatcgatactgatgagcaaattcgggagtcttgcccaccattgtcgagccaaggatgtcaatccaagaagttaagctcatactaaatggggcgactaggtatcccctagagtgcttaactgttgcggatggaagttcgagtctggccacaagatttgatgcagcctggaaatgatcaaaccacggaatatcaggaaggtagtcatccgaagggccaacagcgcagtgaaagaagatcatcgcaagagtcgcatccaggatctcattatgattaacatcttctcccagagcctcacatagtttagagatagcttcaaaacggtgccgcatgatatcatggtcaatttgctcaccaaccaatccttcgttagccttaaggtggatggcagcgacactcagacaacagtgaagatagcacttatttgtttccagagcgcggagaattgattgtgcgcgcaaatgtcctctttggtgagcttccagaacggggaaaatctggcgtagcacattttggataaagtgatcgaggagtggccggtcataatcactaataggaatattgttttgcaacaatgcgcgtgtgtgatcgaggctagggttgatatctcgcggattggcaccatttgaggtctgtgcgaaatattcatcttcaaaccattcatcgccagcgagagttggcattggagcgctgagttggggaggtgcaaatgcactgaatgttgatgtcgaagaatcgtgacgcataggcacgtcgttgataaatgtctgccgctccgttcgcacgtcaacttcataggaaggtacgtaaggtccacgaggagcacttcctaatcctggagtaggcagctgggctgaaaaaagatcgtagggctcgttgtgcctaggatgaacatgttcatacacaggtgaggttggcgatcccgcagaccgatttattgggtctagagtgtcctagatgtcagttgaaaatgtacgcgaagtatgaaccgaataagcacataccacagcgaataccgtttcgctccagcgtcttggtttctctaatcctgttcttgatgcgctccttgtgggctctccgttgctccgcatttacccaccagaccggaagtttgtattcgcatcgcacattaagactgacacaggtgctgcaggcaggatgattctcatcgcatttcttccgacgtaggcggcatgtgaagcagcctatttgaattagtatagttcataggaatgacttttttagggacagtgcgcaaagataagagcggatcacataccagaccgggatcgcttgtgtaaacgaccatttgctctatctccatgtgtgtgaggtgtgcacggagtcagtgacatatctgccgaagcaagaggcctagtagcagaggcagaggcagaggagttctttgagatcggcatattgaaatattgaaattagatgaccgcagaatgatcgatgacagtaattgtgtaatcaaaagaccagaatcaattgcagataaaaagagtatggcaaagctgaaccagcaggctttgtagtctatcaagatataaagaaaggaaagggaggttgaccgagcaactgtgagaaagatgatgaagatgaggaactaaaaccgtgggatttacgatgctttaaaaccgatgatagcttgtggaaagagaagcgggtgtttctattttagaatccacctgcacagttcatagattgagttggataatttgggggtcatcagcacgagttggggttggatcgtcgccgaatattgctgggctgggaagccaacaggtataagcaaccaatgagagttgcagaaaggatgataaaggttgcactcccgtcttttgagactaaatttgggacaattagctctgttatttttgtgacttgaggtcgcatggtggcgttagcgcatgcacctcgacgtccaagttcctcgagggactggatggagatcgtccggtcggactgcgattccgtgctctctcctccgtaacatgggtggctgcatatagctcattggacctggattgatttcgatcttcgggttggtttttagttcctttccactatgcaatagtcggactccaacccaacagtcagagttggtgttggcattcgaatccttttacacaaccaactgagggatttaacaaatttaatacgttaagcctacgcatagtggatgccgctgtcaaaatcgcttgacctgcaaggaacgaaggcggggtcgagatgtgacgagcaacaacagagccgggataagtttcgttaagttactaaattcagaaatatgtcgcaaaatttcggacaaatttagtacagtctggcccgcggcattcaccataaccaatggttgagatcaatcatctctagaaggctggtagatcacgacttgaactgaaggattatgagtagtgtgacagtataggtggagcaagccaagctttcagttctcgcatcataattggatcaagagactagaattataaaattgcccactgctcgaccggggccattgagagctctgactgggtggctggggtatagcgtcccacgtctggtgctccgtgcagatttgggggatgtgatgtgatagacgtgcatatatagtcccttaattagcaacacttaaccgcccagcttcggcacaatgcaaggtaatttaccccatcctgtagtttattctatcttcatttttggtcaaattaaccttgagcatctacttttcaatagatttactattaataaccttcaacggagatcgagttgagtcctaaaataagacaattaatctaatatcgagcttcaattggtatagcctttacacttcgtcaaaccccgctcaaactgctagaatgcctgtcgcttttcttcccttgtgtacgaccaatttcccattagcaacggcccactgcagatttggctctcgattggccatcgttacttaccagcagagttaataataattgatcaatctattaccgcatccaacccaattttagccattcaaccctcggcctgttggaaaatttcgatctacacatccacacgttcaaagtataaacgcacaatgaggaaattcctcgtgccttctcaacctattgtaaaccaaatcaaaatttccctggtccacttgcggctttattcatcgagaaataacgatatcgagtaggtgatgtagttaacgatctgtactcgtacggagtatatgcttagttatttgctagtactccgaccgaatgttgaccgcgcatcatccatcgttcaaaccctaggtagttgctggtcgcgaaaatatatcaagagaaatgatgcctcgcatcttgatgtcggcttccgttctcctagggtacctagataaggactgcaggtatagccatccttctttgtcattctattctacatattgaggcttcggagatatatctatcagccgtgatggtatatgtgccatgttattctcaattgcgaataatcccttgaaattcggtcttgcaatgttgtttccaagataaagcccaaagccctactccgtacctttagactatcctatgttacacaaccacagaagaaagtaccacatccgacaaattggaaataaacacggtacgggatacctatctgtagctatccggttattttctaggctgccatttcatatttgctgcaactgaagtcttatacagatacttgaattcctaaattctcatattgtatgtggcgcatcgggttagccgtcataattttatactctatggagccgaaagcaatgcgttgagtttatgaaatctttgacggtgggaattaggcgagtctaaaatacataaatgaaacctctcatctcagatcaaaataataaaagttatgatatggagtgtgttttcctagttaaatctggcaatttatggtgttgatctcttccacatgaacaactgcagctaatttatcaatgcgtcgagaaatatgcagcacatggcacatcccaaccccaccctagcttacctacaatacggcggtgaaagaatccaaagactggaaaaattcagaaatcggccagcagcattccattcccattagactgcccgccctcccagggttagtatcctcatagtgtgtttgaagtgcctgtcaacacatcctccagaaagggcacaagtttaacatcattgtatccgtacacagatcattcgattagcccccaaggttcatatcatatcaacgaataataagacgaacgtaagaaaaacatgtgctatccaagccaccaagctactaactagtctataatcaaaaaatgaaaccgggcatatttttaagtattggtaacggagcgccgttggcaacggagaccctggcaacgtggagaaaaaaagacaggggcatcactcgaggaatggggatcgcaattaaatatagtaaccccgagtgaaagttcaccttccaagaaaatggcgtagcgctaactgagggttgatgcgtggtcgtcacgctgcgtcgggttcctataggtgcgaagtgggggaggggttgcctgcataggcgctaactgcacaccagtcacatcttcactccaacgtcgacaacgtgatcactttagagaaatgcgcatccttcaagccaattaatgtttaagcttgggccgccttatttggcaagaattgcagtgatgggttataattgggcgatgctaatgcgaggtgcttgcatctgaagcggaactactgcaggtgaatcacctcgtatcacaatcacatatgcccttaatccctgctcttagccaatcgcctccgctgtctgctaccgaattttagttacgcgctgagtttcaccaacttggtatgacacggaatttttgtcccgttgagcggttcgggttggctagatcctttccccagcgctacgtggtaaatgatttcttagcacaaagggcagacttattacagcccaactgccccgatgtgacgaacttctgttggatctccgctcatattgagtctattttctatctccatactttcatttcatcatattgttagttcactgctgtgcgggaactctaataacaccacattcatttaattatactactatatcttgcaaattaccatactcacgattaacgacatggtaagctggaatcctaggaaaatgatatgatcgctgttaaccattccagaatatgaactcatcactggctgctcggcgaagagtagtacctgctgaggtagacacgacaaatcatgagtggttctatcccaaaaagaccgtcgagaaacagcgccccaactcaggggcaaccttcttcgatgacacggattctgagagtggtgactggcgccaatcgcaccggcagagtatgcaatcggtaagtgtccttatccttgtatcaaaatatgaagtctaatgtagtatgaaccaaccagtacagtaacgggagcaacactaccctttcgagccctgagctacccactccagacctcctgccaagaaacctgcctacctttcgatcaagtaaggaactgattgcgggcccttcaggtcctgatttgttcagaggatccaggggttcgactgtggatgttgaattctatcttgaaccgtcaccttcgctcgatttcaagtcacttacacagcctgagtttgtcaacccgcatcaggctgagttcgtcaaccaataccaggccgagttcgtcaagtaccaggacgagcgccccaaccagtaccagcctgagcgctccaaccagtatcagcctgagttcgtcaaccaataccaggatgagcgccccaaccagtatcagcctgagcgccccaaccagtatcagcctgagcgctccaaccagtatcagcctgagttcgtcaaccagtaccaggatgagcgccccaatcagtaccagcctgagcgctctaataagtaccaggctggtcgctccaacccttatctgttatctcctaagacaccaaaggcttttccacgcaaccccgatgtgtctcatctatcaaagaaggagattaggaactgggatcctagccaggtcgctcactggctatttatcggtggatatcccgatgatatccgtgacacgttcctcaaaaatgatatcaccggcgacattctaatgaccttgacaaaggatgaactcgagtaccaactccgaatccaatctatgggcagacgtgtccagctcatccaatcgattgattatctcctcgagaacatgcagacgagaccgattccagaaacaccgtctcagtttccgtccgaggcggcgtcttctaacgggagaagatcccccgaatcgttcgccccccaggaattggctcctaaaagaacccctacaggccaatcttatacaatgtctatttcgcctgacggtaaaattctctcttcgcatgcctttggacagagtggggatcaaagcaccgcagacgcagagtctgtatcgattgttggaatcgaggaatttcatccgaagccccacaggtgctccaaaggagagaaatgcagcaagttcaagaagctcaaggagaagcgcctgaagaagcttactacagagtatcccggcgcagattttcaggggggtgctatctttgtaggcagccccggaaatcctgaaaccgcgagaaatcttctccggcccacgtccgaggccgagctttcagcgatggcatcctcaaatatctttggtcctcggtccggaccaagactctctgaggcagctctgagcgaagttcaacgcttagatccacaagaaacaatccgaaactttctcaggcaccagcatatcgatgacttccccaagcctggaccccttgggctggacacttacaatcttccgccggcagacgactttgaggacatctccccgctgaatgcccagtcaaattctatggccgcaaatctgcgcagtcttccgaggcttacgataccaacaagcccgctcacggaagatatgacaaccgctgttaccaccaacagatacttcactcctactcatcagaatggctctcctactgctgttcagcaatttggccctttcagtcaggttcatcaagcccaagcaactgagacctaccgccaaggtacaccattctccgaagttgatgtccctatcactgcaatccccagtgatccgatatcccgtgatgtgtctcaatctgttcccccaagtatgcaatatggaaccttgttccctccgtaccgagatgccaatcacctctcacggagcaactcgacccgtcccagtgatgatctccctctccgtgatgccaactattttgcacggagcacttcgacacgtcctcgcgatgctttccctctccggcaggtgaacgagggcaagcctctgaccccgatcgatgttcccgcagacctgatccgaagcccccgcgtgaaccagtatggtaacagcagctcgctagctctggccgatccggaagttacccatgcgggatacatgaaaaagcgcaagaccacacgtctgctcagacacgagtggtccgacgcacacttcacgctccgtggcaccaacctggccatgcacaaggacgagcgtgatgcgcaccgcatttcgagggccctggaaaacattgaggtcgacgaatatgccgtcgcttgctcgtcgctggcgacaagctccaagctgacggctgcgttcaagcgctcgatcttacgtaacggaaacagtaccactgacattcgtgatggtaccgcttttgctttctcgcttattccagctacaaaggagagtgagaaaaaggctctgtttggaaacagcgctgttaaaacccaccacttcgctgtcaagtctcgtgaggagcgcatcgactggatgcgtgagcttatgcttgccagggccctgaagaagggtagagacggcgaggatggcacgtctatggatgggaatatgatttgagtgtttagattagtggtcttgttgcttccagctctttgcatatgtatacgcttacaattcgtttggtgttctttgatttttggtgtgctgcggtcccaccatcgctgaaggaactacctaggtatcattgctctggcgcttttgttggtacatatttatttcctgtgtcacccccttggacaaattcatgaaacgcgtcgccgtgagacggtcagactgataccccttgattagtatagttgcgtttagttacagaagaggtagttaaggaattcaaattgttaatgtgcgaatcttatttttcctttataacatacaatcttccttgattttgtaaacgtacccaactcccagctctccgcggctcactcatatatatcttcttttgcctgaacattgccgctggaggtgtttctcaatatcatttgtaaagaagcagaaggaataacctttatttgagtctactctactagcctacagttgaatatggttcatctctatcttgcaaagttgttagcgtcctccgaggacagtgtagacatatattccgtgcttggtgatgctatatcatcccatcatccgaacgactagatacgcccacccatctccataagcagagcttctcacaacctcttcgatcggagcagacatgggtatcacagcaccgtgtagcacgggctttgcaaggacaggggttctccgactgggaaacagattaggtagcaatgtgtgtaaaacagtcccaaccgtttgaggctggagagtggaaccgctccgcgagctcaacatttgacttgactgcatactgggcgctggtatggaaggaggaagtggcgattgtaccactttaagggagggagactcggcatttagcgggagtggtagaaagatccggatcggaacgttgcgaaaaggttgtgagtgccggggaagaaggatatttgatatgcgctgaaaggaaagaagatcgactatgtttcttcgtgttaggattgtctctatgattaatgcagcagagaaggttctacacagaatgtttgactcacgttcttgaacggcattccaaagtcccgatgagtcttcttttgagagactcatgatgcccttagctgtaccatttcgtaggaaatctgcttccttcacactgtttataaaggcatcgttcatgaccattccatcggcatcaagtcgaacaaggtcatgcggccagttggtaaagtgcactatcagacgccaaggcagcggtggcccgtggtcagtggactcattgtctcttgtggcggtcttggaggccgggtctgctcccgcatagaggtcaaataacagcccgactgggtagtgccacttcagaggcacaccctcaaactcaaaccagccatcatgagactgggagtttggctctatcaaaaaattcgagaagaaagctagaagcctaggtagcaacgagggaagatatgagatgcgcggatatgagatctaggaactgagatcagcatttgtgcttatcaagtgcttgaagaacagacatacaagatatggatccgtcttatcaaaggttcgactttctgatgaggctagaacaatctgcagtggcaagcgcccgtcccagacggccttctggatagatccgagagacactcggttctccatcctgaggagtgataaggcgctcggttctttcttcaatgtttgctttgctgctggtttgtcaaaacatggttagctcatatagctatttacaacctataaaaacatacttgatcttcacacgccgtatttctgattactacacgcgctgggattcgcatgtcttcaaccgataagactcgcggatttggaaatgccccgctttcgaaatggtcatgatccgggaaacggcgtatccacaaaattccagagatagtcggccactcttgggaaatcaagcgtttgattccaaggagatactggcggttcgtgttgacatagcgtgacttgaagacgcgccaaaggttgatggcacgtctttctgcctcaggcaataatcccaatatctatgcctcaggcttcacaggttttgatttccaaccttccaacattaaagcagcaataacttttggccaatacatatgcaacctaatgatgcgatggaattcaaggcaagcggatcttgcaggatactggtatcctccagattctggatattcaagcgcaactttgtgtatcttcgttgaccatcaaggtccttgatgaactttctagatttatctacatcttcttttgtgcgtctgtacaccaaatatttctgcacgtcaaaaggcttaagatcacgtcggcattaaatgcagtcgtggcgcgttgttcgcatttcttgcccagctctggtgcctcattttattgacatggccccaataaaaactgcccatccataatctacaggcacgacagcagcggaatacaattgaatcgcctcgccaagtgtttttccgtccgccgtgctttgcagccgctttatattcttggtctcacctaaattcgaaagcttcttggcatgatgttcctaccgatggagcagtgagttctagccatggaagcatactccgtaactgctaacaagcgatcaagagaccaatactaggagcagacccaggctgcgcacgttttagtgacatcgatctacaagtattggtgcaagccgtgccaagattgcgttgaaaggaaaatcgtaaagccgagaagtcttagaactgccgccacggatggccgaagactatcccgaggtgccactcatgtagcttccataccacctcgagactcggcctcgcagccgacaggaggaaactccgccactttcctctggaagctgctcccaacagggcatgcaatatgaaaggattcgagtgtagggctgctagaaactccaaggctggggctttttttgcgctgttgtaaggggcctccaatttctgcaagatcggccaaatttagccttgtccccgcaatctatgatacacaatacgtattcatcccccacgccgcgtattcgcctgtaggttctatggcgaagactgcatttgtggatattttggctcaagaaagacgggtactcgcaagcgcagagaaaatcctattggatattcaccaaagtcaccgagaaaactatgaattcagaagcacaatttcttcaaggcccataggataaacgctgataggttgtgacaggttagtgccaataagtccttcactctaaaatttggcttgtatgactcttaggtaaaggcgactcgccattcaacctcaatttcaatagtgcattcttgaataccaaggccgggcggcagccacggcgtccttccaagccggaatcgggccgaaaagagcttgtatagttctgatcatttaaacaccacggcaacaacatcaggatcatatagtaaccgtgtaactttattggatgagcacattgactcatgtatctatttgtaatccgggcccgaccgccatgtcaaccccggagttccgtttagtgtaaatgtcattcaccccaatgcactatcccgggcggggcctattccgccattcctgggggatcttatgggagatttcaggtagggacaagtaatgatacaacttgaaggattcccccataagcatacatactaggatgtacatgccagtcaaaaattcctccttcttctatagttattcctactccgtagccttactccgtgtttcggttaatgacccgaaatcaaatagacttttaccccttcttccgtttgccgtcggtgtacctcgctattcggacatgtacggtattcgggagctcggcaaaactccgcggctccactggtggttaagggttctcccctataggcgaatgaacgtttttgcatagaacatttggggaaaacaaatcacggggtaatcactcaacaagcgggacttcgctgtgccagtctcccccacactactacagttcgcactccagttcccctcaaactggagacagtaatccgtcacggcctcaccggagcccccatgcgataaaacatatacatacctactcggacggctaaacgtaaaactcttatccggtgtggaagcaaaagtactgtcacaggtatgtctaccatctactgcacccaatagaaaactcttgaacaggaggaaataagaaatttccggtgagctcttccagtttgatatacctcaaaatactataaaaggcttatttgccggctgaatgtttcctccggggaaaacgctaccccggccaatgttcccactcatagcatcttcatgcagctgtaatcatcgccgtagcgtagcctcacgctcgaaccccatattatattgccccagtctatggggttttaggcgacatatgttgtggggagcttagttggggaaatttccacacccacagtccattagaatagcgggtattacttagggccacgttttagcaccccttgactcttcttcctccatctgtcttcgagcaaaatctttctggttttctcaccctgaccttcacttctacctcgcacgcacagctcgagctgtcacctcttcagctatgggcattctcacacttgctgaggatcggccaacgcccaagtccgtttacaactggcgtgtatatgcactcgccgtcattgcatcatgtggttccaatatgatcggctataccagtgccttcatcggtacgactatcacactctcctccttcatgaaggaattcggcctcgacgagatgtcttccacacaaaggagtctgattagcgagaacatcgtctcacttttcattgctggtgcctttttcggtgccctgggaacatatgccctaggccacttcatcggccgaaaatggagtttggctgttgctgccacggtattctttctcggagctggactacaactcggtgctaacagtgcccgggggctgggtatcctctacgctggtcgtgtgctgtccggtttgggtaccggtgtagcctcgaatatcattcccatatatctttccgaactagcgccccctgcaatccgaggacggctcgtcggtctatatgagcttggctggcagataggcggaatgttagggttttggattaatgtgagtctccctgtctctcgttgatcttttttttccccgtgttatctttgcattcaaagctaacctagatatggtagtatggtgttgagcaacacatgcctgaagtccacgagcaatggatcattccctttgctatccagctcgtcccctccggtctgcttttcataggtgccttgtggatcaaagaatctcctcgttggctgtttctcaaggaccgtcgccgcgaagcgatgaaaaatctttgctggatccgccaattggaggccgatgacatgtacatcaccgaagaggtagctgcgatcgatcaggctcttgagcatcagaagacttccatcggtattggcttctggaagcccttccaggctctcgctactaacaagagcgtcatgtaccgtcttatgctgggctgcatgctcttcttctggcaaaacggctccgggatcaatgccatcaactattactcccctaccattttcaaatcggtatgattgcgcctcatcagatgcatttctgataatcaattacttatgctaactcatgtttcttagatcggtgtcgacccgaataccgttaacctgatgaccggtatcttcggtgtcattaaggcggttatgaccttcgtgtggctcctgttcctggtcgatcaattcggaaggcgcaatctgctccttgttggtgctgtgactggatcgatctgtatgtgggtcatcggtgcctatatctgtgttgtcaagcccgaagataatgtcgccacgtctctgaacggcggaggcattgcggccatattcttcttctacctgtggactgcggtttacacccctacctggaatggtaccccttgggttatcaattccgtaagtcgctgcttattaccattctcaattaaacattttcctgaccatttattaggaattcttcgaccccaacttccgttccctggctcaggctgccacgactgcgagcaactggctctttaacttcctcgtctctcgcttcaccgaacagatgttcgccacgatgcactacggcgtgtacttcttcttcgcttcactgtcattcttggcattcttcttcgcgtttttcctcatccctgagaccagtggtgttcctcttgagaaggtcgaccgcctgttcgattgcaagcccgtctggagagcgaacaagatactcaaggccgcccttgcggaagaggaggagcagttccgctacgaggtcaaggaggcatcgtaccatgaggaaaacactggttcgatagctcctacgccttgagatgaggagagacaaatatgagcgatacagttacgaagagatatatagagctagtcaaaccttgtacagatgatcacgatgtatagacgctgaatagattatcatagacttatttttcaattgcccaaaactatacagtatgcttgaccaagagtttggagttttgggtaatggcagcccgggccagcaaaaacaccggagccgcagcgtagatcaggtcccccccccccccccccgcccctccgcaactcaccccannnnnnnnnnnnnnnnnnnnnnnnnnnnnnnnnnnnnnnnnnnnnnnnnnnnnnnnnnnnnnnnnnnnnnnnnnnnnnnnnnnnnnnnnaccccggggccgccgcggaggtcagggccccccccccccccggtgtttcaataactccaaagttcggatattattattctagttctctagttattactatacataatcgcgtctttaaaagcaaaaaaaccaggtttgacgactggggaagcgcataactgtggacattaggagctcaccatcacctagctttggccacttaggttcttaataatgaatttataagtatgtaatcccaggcataatataacacgcaatatacggtgtgagctcagactcatccacaagcaaactcctgcgccgtctgggcagtagcgagaaaccaaagcgcgctggttgcgaccacactcatttcgctgtatgctcgcgtggggataaacacagttcaaatggagttggtttgacgagaagacgaagaatgaatggaagagatttatgacagacatagaacacactcattgctaacatcatgcataatgattttgtggattggtgattcctggttcccttggccgatgacaggtctgatagcatgcatagtgagttgggcaatccctatttacatatatgatatcatctggcatatatagctctgtagatcgtttgctgatgaacattacgatcgctgcggttcattctcgattccagggttgtggctagtgcctacgtcatgccacgagatgggccctgcagggtatagatcagcactgatattgaagatgaaggagatgtgtcgggcacagtgggagttggtggttcttgatttcttcaattcataactagttatttgaagttgtcgctaatgacgatcttgttgcagtgcattttttttaatatgcttcacaaagttgtacacagcacacagccaggtttgcatattcaagtagtacaaaggcgcgaggggtcgcagatttgtcagctggtaagtctgattgatcaggcgaatatccaagacccttctccgtgtggctggattatttgaagctggcgatgtgtggaaagtgattgaaatccggggcacaaatacagtatatgtggcctaaaacatacccaatcagtcgtcgcaatcccagcagagtgtcctactccataaccttgctaaaaatgatgaacggggtactccgtacggagtagctccagatcataaaatcccaatcggcaatgaacgtgattaaggtgagaacattgcgattggttggacattgccaccagttttacattgtccaatgagagacatgggtctcaaaacgcgatcgttccaaggtcgacgcattctaaatttaggggaaccagatcctttgaggctttctaaaaatggcagggatcggctgataatctggaagccgacggaaaaagactagatgaacactatattgtatagactcaaagccaaagcgttcctttagagtatgttaactgtaactaccggtctaaaggcagaagaaggttaggtaatgttgacctcgagagtgcgcgagatggctgcttgcggaactagtttggccggtggcggcctagagttttttttcatgttacgttggctgattcctaagcctaggaaaaagcgagaataagccgaaataaagattttcactacggagtctacggagtttacggagtaggaatcggcaggatcgtctagggtcttgggggggttggggcagtgtagaggggcaaaaggctgggatgaccaaggtagctggggaccgtagttgatcatgactccaatgtacggggtaactacattatacagctaatagtaaagccaagtttaactgtttaatgaatgtcggttgcctgagagtggcttcactgcacgaccctggacgatctttttggctccactgagcgcttacgtcgtactgtggagttcaatgatatcaggaaaatcgaggaaaagaaaaagaaacgaaattcccattttctcttttcaacatacactcgttttgtcgccatgcaactgaatggctcccttttcggagctctcatcctcgtcctccagagtcttcagcttgtacaagcagagaacctcatccaagccaccgggctgacacaatgttccgatagtgccgaagtgaccgtcaataacttcaatgcgatattcacgccaaacaacaagtccatcagcatcatctttgatggctattccgaagtggccggagatgtgctcattgacgtggacctcctggtgtacggatacaaggcgtttaccaagtcgttcgatccatgcagtctcgatttgtcggtgttttgtcctatgaaagcaattgaactgcaaattcccaaaatcacccaaacattgggcgacagtgtcctctcgcaaataccatgttcgtccacacttccccgatagtcgcaaattctttcagggctcggagactccggaaattggtcttactaacggttacgtcatagcgatcgcctatagcgtccccgacatcgatgcagtgattcggctcaggctcaaatacaaaaattcaggtaaacagatcacttgtttggagacccgtgtccgcaatgggaaaacagtctaccagcgtggtgtgtcgtggacactcgctgtcatcaccggtcttggtctcatcatgtccacggtcatatcgcttctcggccattcgaacacggctacccatctcgtcttccgatcgcttgcattcctcggattcattcaaacacaggcgatggttgggatgtgttcaatggcattgccgccgtttgtgcaatcctggactcagaacatgcaatggagcttaggaattgtgcagctggatgctctgcagacaattgcgacctggtttcagcgcgccaccgggggtacaccttcgaccgtgcttgaatcggcgagtactgcatctgtcgtcttacagaagcgttccgccgggatccatcgcagagccgcagaggaaggaactcaaattcttcttcgcggtattaaacgggttggaattcgcgaaaacatcgaactgagcaacatctttatgaccggatatctattctattacttcgtcaccgcagtcatcgtcatctgtgtagggttggttctcctagtccggggtgttttagccaagaaacagacaatgcttccaaagttggatcgtgccatcagtgtcaccgcagattggaaaaccatcctccgcaataccttcttccggctggcatgcatcggatacccacagatgtgtatcctatgtctctgggaactgactcgtcacgactcagccgctgaaattgtcctggccattaccatgtggctggtcacgactgccgtcttagcctttgccacattcaaggtgttccaacgcgcgatacggtcgaaacagcagcacaacacacctgcgtacacgctctactccgacccggccactctgaaccagtggggtttcctatacatctactatcgcgctccggtctattacttcattgtcccagctctggtttacatcattgttaaaggaatggttattgccttcgctcagccttcaccgatcgcccagtcgatcattctgctcgttttggaactctccatgatgctcgcaacctccataatcaagccgttcatgagcaagggggctaatgtcgctgcaatcacgatgacggtaatgaattcgctcaatacgatattcatgcttgtttggacgaatatctttgaccaacctgagctcatgactggcatcctgggggtaatcttcttcatcctgaatgcgcttctcactctcttgctcctgatctaccttttggttggtatggtttacgccattttcttcaagaagcccgacaccaagtataaacctcttggcgatgaccgtgactctttccgctggtctcgcaccggaacgacgactgagttgtcgtccctcgagaagatcgcaagaggcgaggacgacacagaaggccaccctcatcccccgcccgtggtcactgctccgcccagcgacgaagatgtgtcaatggcagccaaaaggccatataatgatgttgtggacccttcgctgccgctcttcccagccagctatgaacgcacgcaacgatagtcgtgagcatttagagtcaatattttctctctttttctctctccttttctgtttttttttttttttttttttttgttttgaagcgagatttcttaattcctgcattcggtgcgtcggcgcttcgggtggctattgtacatattcaaaattttgacgttcaggaattgggctagataatatatgtttctagaaagctttttactgtgtttgctctacattgaatatgaacacctaattaaacctttcatttcggaataaagacgtcttaagaccgcgccaaatctgactcctttgccaaaggatttactctgctccaagtcttctaggaattgcaaggttattgccagaagagcatcagcgtcagggtctcgacagccgagaaataaatttcccgaaaaaaagaagcattagcttagtccattttattgtctttacaaggggagcgtgtgtcaagtgctagctggtcaaaggcatctggtctggctgtcatacaaaatgccctatgaggaaatgtcattccgatgttgatatctcttcgcacgttgtcttctagttcttttatcattatgatttgattacctatcatcaattgcttacatctgattaagttgctatatattgtctagctgagcattgtgagaattggttatcaccttggctttcttttcccagctcctaacatagacgtaaagaaacgaattgataccaacaccatttagttagttacagcttatctttcacataatcaatccaagggcactccaggaatgcggctgtgctaccatcccttgattcaggcgaccaacatgcgagtcttataaatatcaaatttgcatgcgtgttagtcaaggctgagcatattacgattctcgtttatagttgtacacactctgacagtgtcatcccaagacccagaatagactcgtcatctggaccaagacggacttagcgagtagccatccgattccgagtcaggccccttgtttgcagccaactcgaggagatatgactggggtgtgcgcagttcgatgaggtggcttaccggaaaaagctggataaaataagccggctgcataggccacgttcacacgcgtggaaaaatgcgacgtctccagtacggagtatctgtcagctgtttcagactcgacgctccacttcgctctcggtgcatatgtagctatggtcgaaacacatgttgcgatggtaacaagctgcagctactccgtgcactttcggcatctatgccggaacccactgtggattaagttgatccattaagttgcgtttcagactgaggcgtcctgggtgattggcaaggtgagtcaaatgagggagatgtgtggacgatcccttccccttctgtcaacatccttgccccttggatgatccgtttttggacaagtttggcttttttttctttatgataggtaaaatcccaaggagcgaagaagggtctcattattgagtttctgtaagcttcaggggctagatttcagtctaaaaaaagaatgagctcttgaccttaatttccccagggctgagaccgttgtgggattagagcacatcacaaactaaacgccattgcattccgtaccaccaggtcagctcacctgggacgaatgatcggcttaggtgttcgggcttagcgagccaagtgattgacgccgtaggtgtatgtagataaggttgctggaattccgccagacgtgccttgcatatcccaacaggagaccctgtcaaacatttcttaaaggaatgagcgaattcggacacgcgtgggaaaagcaaccttattattcctgaaacacaggtttccatatggcgagtgtggcttgggcttagccaagaattgaaaaatgaaacccaataatggggtatatctgcatagttagtgtacaacataacgccgtccgaaaagtctgtctgcggacatccgttatttccgaggatgcttccttaaaacatagagatcagcgccagcacacttggtaggtagcctttagctagacgccgtgctcgttgccctattttgtagatatgtaaacgcctttgatcagcggataggcctaggtcttagtggcactaaaaagcaaaatactattactgctgtttccttcctgggatgtcccaatctttggactcgtcataatcggctttaacaaggcaatccatgtgccccttttcttaggcaagctcagttcaagtttccgaaaataagtcactcgcatttcggagatcttcagttctctatgcagtatactagtatctagtcagttaagcattcctatatttgtaataatagcgatgcaaaataacctttagggctcaaggctggcaaggcatggctggtatggacctgctactatcaaagtatcctgcggcaatagtggcttgccttatcccgactcgtcgttgagggatctgcagggttgttctcaggaaagggaaatgaaggaagcatgcagcagacgcgcgtgggccggggaatgtagcatggtgagccttgttctattttatttatctttttgacctcttagagctgagtccctgggtcaagacatatgttcatgaccatgtgatcgaccacgttagtccccgacattgtttcaccctagagggagcgaggatacacggacattgcgaagcgcttgtaccgccaagggttccggatttgtttgtttcaacgggttctagacttgtcttgttcctgtttttttttttaaaaaaaggagatccttgtttgatagctctgtcgaatatccgtttgcagaaactcgagttgatgtttatttcaccccctcacttcattccacagcacatatgtagaaagtctggatattccgaaacctgaaacatgcggctggccatgtgccgaagaggaatgttggatttacgctcaggatgatcgtgaaagcgggtcttagtccacgcatccatatgcggctggtacctgcctctcctagccccggttacctgcatttcagccaatgacaacagacatatcgcttgttttgcgtagatgagccgacgggtatgtgcttttttgctatggaccctcggagtttcccgctaaacgaataccagaactggcatggttcatgcggactcagtcttggcgaacgttgagctcaagggtcgagatgccgtcacaggcccatggcaggcggaggttatgcactcggtgaagatcttttcctcgttttctccttcgtttaacttgtactgtccatgtgggctatgatgcgaagctcaaactcgcgtgtccggccgcaaaggcatgccgtcctcatgcatagcgtcagacctgcagtgtatatataagagcttccgctcagttgtatcctggtcatcatccactcagaaactcatcaattcattcgtctctacagttccttttcaaacataccgatcaaagccaagcacatacctcgctcttgagcaccacactaccccaaccctccttctttctactgggcctcttcccggtgacctgactctttgattcgcttgaaccgcttgcgaagacctcacgtttatcaccaacaaccaactacacatcatgtctatcccggtcccggaacccagaaccacatcgtgagtgtatctatatcaaagtgcatccttttaacaatgaactaaccggcttttcctagtgttgccaacggcaccagtaccaacgccttaagccaaggcaacgtcagccaagtgccggcaagcaaccgcagcagtgtggaacgattcgcacgagcaccagcctccgaaggcccttacttcgccaatgcgcggatgccagagagatcggcacacctcgcggcgctatcaagccaactcaatgccatagaggagattatgaagactgggagttagaagatcaaagcaaatgaataaatgaataaataaattatccaacaccagcttctatgtatagtcggtctattaaatggaacgcaacgaaaaaccaatgaaggcggatatatcccgaaactccccctcaaagagtggatagattccgtaaacccttgttcatagtatatcgaagatgtaagatgctacttcctcgtacttggtgctggggaactcatgtcccgcttcgtaaaacttgaagacaacattgccatccagggcagccgtggcatctggaacaagttcacttttgacaatgattgaatcactattaccacacagaatgtgcactttgttatccgccggccttttatcttcattgcttgaggcgctattctgtgcagttaaatactcaccgagacgcgcccatgtgttccattggcgctctcgaaggattggaccataacgcatgctagacatgaacgcgtggacaaaccccttgttattattcacctgccacgccacggtagacgggatgttgatgtggggatactctcgggacagaatttgagttgctgcagcgctctgggatggcagttcttcggtgagtacatccgcggcactgggtttctcgttcttgggcttggacgaggccaaggggcctgccttcagccgacggctaaccaaggatgctaagatattctcaggcataagaccctttgagtaaaggagtcgactttggaaactgatatgcgaatcgcggagcaatcccgaaggggctaggagcaccaatgacgacagaagcttaggaaagtaggatgcaaaggcagccgcaatgccacctcccagagagtacccggtaaggcagaatttaccggactctgcacctgtccaagagataggcgatgatgtcagagcgaggaagatctgtgtcgagaagaggcggtcatcttgtggaagatcagcagggcagtcggagtatcctcttccgaacctatttttcaagggtcagcgataatacaaagtgttgaatgttgtgcaacacgtacaagtcaaatagcatcacacggcagccgcggtccaccaacgcatgggccaccccgccgagcgagatacacggtgtggtgataccgtgcacgaacaacaccttgggtccatcttctgggccccattcatacactcgcatagacccgtatgggctagcgacatcgcgagcaccgggcagggcatcagccgggagaggcaatttacgattctccgactcgggtaagactgtcgaccgaggcgatacgagaacagtcgggagcgattcgttttgagggaacaccgatcgagcgagtagaccaagtgtgaatgaagccccagtcactgctagcaaagggatctgagtctgatggtttgagaatgcaccagaaaggaaatccacagtttcgttgtacaggcccatggttgcaattgcgggaagtcacccctgaaacaaccgtagaagcaagttcgtcgaagattggaaaggtgttgtgatgtaatattgacgacctgaaccgacgagagtaatgaagggaggtaccactctgcaatgagggtaaacgaatgcaccgagttggaagacactagtgcttgagggctgcgaccgaggctcaccgcgctgccgtgttgacgccatgtgcctgcccaaatggtaagattagataagataagataaggataaacctcggcagttcggtcaactggtcagtcttggaagtatagagacccattcattcaacaccagttaaactacagaatataatcagcaggaccctcaaatgtttatttcaaaaaaataataacatcagatggtcctctccttcacagaatgtgtgacaggtccgccctcacacgctgcccgagccagccaatgacactaaggaatgttgttttcccacaatatctcacgtggtggctatctatagaccaagttattttcagtataagtagctaatcaatggtattctacgataattcagtgataattcagtgaagaggaatgtgcggtagtcgtgggtgtgaaattcagcagacgaggtcatccaacaacgtacgtgtgcgatggataaatggattgaacccatgactctcctatggtcaaccagttctgcaagaggatttgcagatcaaggtctagacatgaaggacaaagtgtactttgaccaagaaaatagcacagagagagaaaggaagtatagaaatacctaaaggcggccctaaggcaccaggcgcaggcctaagagaaaccatatagttactccgtacaagcgcaaagcttcatattatagatattgacttttgtattcaatcttcttcgggtgaacattagggctaaaataaattacaatttgggacctagtcaatccgacaaaggagggaaaggtcggatgaagctagaagcaaaagttagcaagggactcatttggaactggaataatagggacacatactgagcaggacactcatacccagcagggttattttgaagatagagctggtgatattcctccgcatcccaccactggcctgctggcaggatcttggtagaaagcggagttttataccactgcttgctgaccttgtctgtaatctcttgtgcgatcttttgctgctcttccccgtgcgtaaatatcgcactacggtactgtgtgccgacatctggaccctgccggttttctgttgtggggtcgtgcatgcggtagaagaattcaaggagctgacggtaggtcacaatcgagggatcaaagactatccggagggcctcggcatctgtggaaagaaaaaaaaagtaagtattcgaaggtgcgatcgcgataagaaattccgcgttatttctatcagatagcacggcacttacggccagttgaaccggagcagacagctcgataagttggcgacggaactgggccaccgcaatagcccaccttagcgtcgagtaggcctttgccgttgccgaaattcttgcggtacaagtgctcaacgccccaaaagcagccagctgctacggtcgcggtctccgtgccaggcattttgcgggatttggtttctgatgtcaagggaaaagctgagctggtggagaaggaacgaaagaagcgtgagaaaagggtcgaggcaaccggagcgacgaaagtcattggaaattctggtgatggtggagacgtacttgataagtggggatgctcgcgggttcgaaagtgaaagggaccgtacaggatgctgtaagactaatgaaaggggagcaatttgaagggaataaatataaaaatcaaagtctcagaacaaagagtgagagggaggaaagggaagaaatagaagggagctcgagattagagcttcgcgatggcgtcatcccagaatttacaaagcagcgcggggaattcgacagggatggaaagattagggcttccagcagccctatccgagtattattgtgattgtacaagagctgccctccagctgaaaaccaacaatgcaagaacagagagataataacaggcgaaatccaataagaattctgtcgtacaaatgtacaaaaaagaaatgtggtatctgctacgccaacaaaacaccagttccaaacaagtcaaaacaaaatcaaagctagtcatgaataatttcaagtcattcaccagagcccactaccacgcttgcgagttatggtcggcagcagggggtgctgccatcgcactgagacggatggcctctctgctggaaaggctgatatttcgaggtcggccgtctccacccaatgttgtgcggcggcccgtgttcttcataactgggagagtgtgaggactcaagacccgaggcttgacatcgtgttctttctcgcttttgaccatgcgccgcgcttgtgatgcagtgaacatgtggttgtctgcgggcggagtcccataggtagtagaagtcgggctgcgacggcggtgaacacgcagagtattggaggatgggttaaacagtccactaggaatccgtccattagacatacgtcgcatggctgaattgatcttaattgcatcttccttgtccgacttccagttgaccctgttttcagataccggactgctggagaagttgccgctgggactacgaactgcaatccgcgacggacgatccgtcgaggggcggttcataaagctgcttccttcaatatcacggaggggagagctatctctttttgaaagaggaaggctggatgacgggggtggtgccaatggtgagctgccatttctcttggccaagaatcctgccttaaagcgactgctgttcttttgaatgttcaaggtagacccagtggattcatcaggtgtaggtgaaatagaaccggccgggctgataaccctcggaatatttcgtggaatgggagatcccgatcgaggtggcaaccatgacttttcaaagctagtttcatctgcagagtcgaccttcttaggggtcttttggaactcggtcaaagtgccgtcttcctcatcgtccttccatcggacggatcgcttgggaattttcatctggactttctttggcgaaaaactgacactcttccggccggcagtgcctctacggcgacgtggagatcctttagttggtgaagcaggagcatcaggggtgagtgtggttggaggattggcgctcgatacttgtggcaagctcaccaagctgaagcgcttctttgtttttgtggggcttgcaggcctagcagagctgaggttcgggacagacggcatggtaccgtctggtttgacaaggttggttgctgcatctgaacaatcctctaacatctttgtaaggatagtccgcccctttttgagagcctcgttggcgtttagctgcatgatatcctcgatggagttcatcatctcaaactgtgcttgcaacagaagctgcacggcagcagcttctccagccttgtcctgttctagcacagcggtcaatgcttcgcgctctgcattggaccgaagaagatctgcttctcggttcaaattggcatagtcgctgttatcggtaatgtcaaactcttgaagctgctttgccgcgttctccaccgccgagttcaccgctcggtcccaagtgctctttgctaatttctggttgtaatgatgtctgctaccttccagttcaagaaggattccctgtgcagatttgcggacagcatataggttcgataagccctcctcagtttcatgcgcggcgcaaacattatcaaaggccgcaatccaggacgataaaatgccaattctgcggccgatttgccttagtttcagcatgttgttcgtcttctcttgtctttcgggtaacgtatgttcgtaggcattgcgaatccgggaaacgccctcgcgcaagacagcgtctttcttctcaccttgcttgcggaacttagtgaaggctgccttttcgtagtcttttgcctgtgctttgagctcattgatcaaattcatttgctcgtcgatcttgaccaaaaagtccttcacgtgtcggttaacgttgaacacatttcgtgtgaccttagtctggatgttcttcgctcgattcgcatatcgaagtgtattttgggtctcgtcaaagtgctggcttgaggggctgacacagacaatcatcactgtcttgcaattgccaccaagagcaaacttaagtaatcgagtgagctttgagttacgataggggatgtggttacgctttcgagggtcgcaaagtgcattgatgcaacttcccagggacaacagagacttgttgatattggcgccttcgaacaaacgttctcccctgttctgtgtcgcgctggcacgctcacttcccgctaaatcgatgatactgaaagtggccatagtgtgaggctcattgacgtcggcatttcggtctttttgggcgatgttgatttgaaggacggcatgcgatcttgatgaagtagcatttgctgccgtaggagacatggtgcgacgctcgttgccttgcatgatcatgtccattacctctcccacattgtgcgggtggtagcttgacagcccagcaactgagaccgactggttggaatcctcccgcagcatcagtccaccctttccactgctaccacaagggacaagcaagtcacgaatggtttcattatagatttcgaggtaggaaagagaaatttcggtcgatttttcgtctgcccgttcgtcaatccgctcaaaaagctcctgcatagtgagaaagatgataccgggctgttgggcagtcccggtgattgtatgggtctttccacatccagtagctccgtacgcaaatactgtcgcattgtatccatcgagcacgttgtcgagcaggctgcgtgttgtagattcgtatacctctccctgggaggcattttggtcgaagatgcgatcgaaggcgaatgtttggtccttgacacgcttaccatttggcaccacgctcctagagaacttttggacgggattgtcctctggggggtcaaacaccctagtccggttaggatgttggacccaaaacgttcaaaatacatggaatactcacaagcaacggtcgtcaatcactttaacgatggatcgtatacccttctggttaagcttcggcgtcggcgcacccgcgagggaaccatcgcctaggaacagcggaccctcgtcacatcgtgtgatctgggctgcctctctgatagtaaatggtcgtactctgactgtaacgctgatcgaggaagcgccgtcggaggcagccatgttggaaggtcgggtcggatcaaccccaagtcgcgaggtgtcttgcggggccggtacgtcaggcggttgacgacaccctgcaatggcaaagccaagggggaaacttagctatttgtcaaaatcaaagaatgtagaaaagttgaagaatggatctaaaggtgtatggggtagggggtgcaggtattctccgagaggggctccttgaagcgatttcatttgttgatgcgtgtatatgttgtcatctagtggttgctccgagcaaccgtttcatagtggtatttggtcatttaggcgtggcaataccagtcattcaatacaaagagttcttagtcacatgatatgttgtgtgtttcaggttctgaacacgtcccgtccactttgttcacagccactatgttcaagttcgccggccaaattgcggttattaggcctttcatagtattaacctcaatatgctaagacaaaagctgtaaatagctaggaggagattatgatcgtattatgacattgactaacattgtaacgatttcagtgaataacaccaatctttaccataaagcgggtatatttgctctcgagatatggaaaatttatgaataaaaatcatcgctttcgtgttgctattgtcctagtaatatcatttttcgtctgcacaaacatcatatgatagtttgaccaccagagcctcctgaaacgccgaaggccatagagatgtatcctctgaccctagttcttcctcgcaaatcataatggccctattattgttcctctggctcatcttcataggtcggcatgatgacatcccagcccggatcttcaccatcaaggtccatatcaagaccgccactctgatcctcggtggatttgtggaagcggaaggcaattgaatatccgttctctagatcggcttccattacagttggtgagtcattttggttcatatttcttttcggggcaccctcgttgtccattcctggtacatctgcctggaggcgtttccagcctttttcgaggtccgctcggtcgacaggctcaccgaactcaacatcggaggtggagtcaggaacaatgtcgccattaatgttggtaatatttcgcgatttcagagcatccagaagcctttttttgacgaagtagagtgactcgtggggttggagcatcagaaggacagtggttttatgcttcttgaagaggacggtcacagcgcgcgagtcggttttggattgcctgggaggctgcttgataattagccatcctgcattcgatgatatttacttgaagatatcaattctcataccatcttagaggctgcggggaaattaaagggtaggtcgcgtctgtaattgattatttgggagtgacggaaggtggagaatccggcgggactccgacttccgcgctccgaatctctgagctctgccagcatctcacattcaccacgctctctatagccagcccttgaaattggttgctagtatcctcattcttcctttacaagcttcaccatggatgccaatcaccccccatctaccgactcacagcataattccatcgtcctcaggatcgtccactgggacaagctgtttgaatccgacagccctccacggttaggaattgagttcggcaagcggttaccgtatgctaccctatcggctttttcgactggtctggcattagggtactaccacggcagcaaaagggcagggctcgtgtttcgggctgagaatgcgcatcgtttccccacgacatcaacagggtggttccagtaccataaaacgaaaaactatattggcgtggttggaggggtcaaggatggtatgaagatgggattcaagctaggtgctggcgcacttgcattctgtctgtttgaggaaacagtggactatgctcggcatgacgagagagactttttatcgacggtcactgccgggctatcattctccggaatctacagcttgcttggtaaggaaactattccacttggacatcaatactaggggaaccgaagctgacctagcttgcatacagctcgtcacgatgtgtacactgccgcccgcacagcgaagcttgggttgaaattgagcttgacctacggtcttctgcaagatgctcttgggactttgaaaggaaaccgccctgcctatgttgatttcctcctcggcaaccggcggtccaaagtcgataaagaagcatcaatgtgatcataggcggacccatatcagaatggtcccttagatccttctttgtgcgcatgccccagtctcgcggcaggcttgagagacccccaatgccgataaacaatattaggctctcccacttcactccctaggacactcttcggcctacgcatgctactgcaggtggtatgcattcgacgccggcgagatgagccacatatccgagtcaatgccgccccaattactatgtctaggcctcgagccactctgaggtttttagtcggtgagcacggcctctctccgtctgatcgtgtgtttttcagaagcaacacccacactgtactcttggttacttgtattatttacattttttgataccccctcgtccaattagcatcgaaccaatgaacattatttttccttggggtgctatgtacatagtgacacgtgacccgccggattctgtgttggggttatgatcatgcaccaagtcgattagcaacgccattgtggcgtgactagatcgcattcggactaaaatattaaggcattctataaacatccaacgattggcgtaggattactacgtggctacatggccctgaaataatataattataaaaaaagtctgacggttaccccgacacaacgatgtagagaaacaaagtaaactagctgattccgggccctgacagcgaaatctacgtacttcgtatatcttcccaattggcgtccacggatctttctttgtctccggggataagcaaatagagaagatcggcccgaatgctgcaggttcaaaggatggtgattgaccgctcagtgctgtcccccactttttttcaaaaggaaagaaagaaacgtcttcaagaccaatatgtatctatattgatctatagtgatctatattggcttacaagactagaatacgtcaaatcccaaagtggaggttcccatagagtttccgaaggcacccaggtgatcggtggagaaaccgcatttgacgtcgctgattcggaaaaccccccacctcaacaccttagctcgaacttgtcgtgtccgacctttttttccccaatcttcgcttctcctctataccttacgtccatgtctgtccgttaaactccgcgatagcaattgggcgaagatgccgatgcgaggttcgacgctgctttcgtcgacgtcatcgatttattgacctctttaatgcctgggagaaataattgaatcatccatcccacatcttcattcagactcgtgaactgcatcacaatgcgtcgccatggcaggtccagtggcggtccaaccaaggccgtctcgcccttgtccgacactgtatccctcatacgttcattcgattcggtcatgaacccaaaccgacccgcgcgcccctcacccttggcttcctctcacatccaagctttgcccttggaactagtagatcggttgcggtctttcccgctgtttcaagctaccccggaatccttcctgatcgaggttggacagcacctgcgtccacagctccacgcacccaacgattatatcttgacggaaggcgatgagtcaaaggcaatatactggctggtgcggggtgccgtctcggtcacatctcgcgatggcgagagcatatacgccgagctcaaacccggtgcgttcttcggggagattggattactcatggaccgtcctcgtactgcgaccatcatcgcccggactcgatgcatgctggtcgtgctgacaaaagacgactttcggaatatattgcctcggtatccggaggtagaacaggcgatccgggaggaggcggaggaacgattgatgattttagaaaagaaaaaaaaggaaacgtcagcgcctgcactggatatgccgagcccggcacgaagaggctcaaaaagactgcgtgaaagcatttcaaagggtctagctgttgccgaggatgatggagacgtcagtgccaagtctgtgtacaagaagaggaagtcaccgagtcccggtcggcgggatggctccagtgcattagcaaatggattggtcaacgtacgtctcttactgaaagagctgccgcttttttctggcttgcctgccgatatcctccactaccttggtctcaatgcccaaccgcgatctttccctccatttaccgacatcatacaacaaaattcccagggccgtgagctctacttcattgttcgcggcgaggtagaggttcttactgaaaagacggagatggaccactcgtcggcaaacaaaacaagcccaaataggcacatcgaacagccgggaattgaggtcaaagctaggctgaagcaagggcagtactttggcgaggtggtcagcctagatttggcacctcggcgaaccgccaccgttcgatctgtgacttcagttgagtgtttgatgctcggcggtgacgtcctggctaaattttgggagaaatgccctagtgacgtgcgagaacaagtccaacgcactgcccaggcaaggctccaggcggcagccgatggcgatgttattatgtctgacgaggcggactcacagccgtctcttggtgatctcgccctcgacgacagggtgaagatcacatcatcccggcggcggtcaatgccactacttaccctcactgaaaccgagctggatggaccacatcaatcctcaaatgctgaagaccaagaccaggacgtgctgcggccctcagatcccgatccatacttcagcatgggtctagataaagtccggatgcgaagtcgacgtggctcgctggcacctctagcccccgaggaggtatcaagagagcagcagcgctcatctcctacagagctgtgctctgccagttcttcaaccctcgccctttctgaaactgctagcctttccaagtcatatcataccgaacggccccgggtcgatggtaccaatggattactcccagacagtgtattgctgaacattttccaattccttgagcttcaccaacttcttcggattagggcggtgtcatcccattggtcagatctcttgaccagatctgcggacgtgattcatgatctggatttgagcgtctacaatcgtaggattacagatgacgttcttgttaaaatcatctgtccgtttattggcaatcgagcccgatcggtcaatatcaacaactgctttcatattaccgacgaaggcttcacagtattggccgcgacttgtgccccaaatatcaccgcgtggaagatgaagagtgtgtgggatgtaacggcctctgccattcttgatatgtccagcaaagctacaaatatacaggagatagacttgagcaattgccgcaaggtcggcgatacacttctcgcccggatcattggatgggtagtgcccgccgaccagacgatgggcgagaagcagtcatcgatcaaacctacaatacagacagcagaatttacagtgtacggctgtccaaagttaaagaaacttactctttcttactgcaaacatgtcaccgatcgatctatgcatcacattgcgtctcatgccgctggtcggattgaggaaatggatttgactcgctgcaccacaatcacagatcaagggttcaaatactgggggaatgctcagttcactaacctgcggaagctttgcttagcagattgcacgtatttgacggacaacgccatcgtgcatctaactaatgcagccaaaaacttggaggaattagatttggtaagctattctttgtcgggctctgtcgaactagaaataccatggtttactaatcgccaccagactttttgctgcgcattgtcagatacggcaaccgaggtccttgccttgcagtgctcacatttgaagtatctcaacatggcgttttgcggctctgcaatttccgatccctccttaaggagcattggtctccacctactttctcttcaacatttatcagtccgtggctgtgttcgagtcactggagtgggtgtggaggctgttgcggagggctgccaccaactccgggttttcgatgtcagtcaatgcaagaatcttgcaccgtggcttgaggacggtggtgctgttcactatcaaccgagaatcgaattcaaaaccgtcgccccgaacaagaagcttcctcgattaggaagcaacacatacaaagcttaacctcttcattgcacactcttacgctggtttctctaccgttaccttttccccctctacaacgacgcctggcgcgacgcccgtccatcctccatcctccaagttgcatgatacatttattgatagatgatgtacgcctctctaatcttcttctcattaatttctaggcttaccattctctagtttccgctttgccatccctaactgatcgatctcggcgtttgaatttaccaggacaatcttttcacattcggattcattcttctcgcgtcgggctgcaggttcttgtttttacattttggtgggggtttcggtctagcctgtgggcaggtcaagcatggccggagttcagagattgaaagcatctacgagttacatggtgtttgtctgttttccttaatattcagtgttttggggctatcttgtatcctttcttacgatgtaacgatgcacatctatttgattttatcgacatttctttctgtattttaaggtccttgatgctatctatttctggtttgtagaaattcatttgactataaagccgaaggtcttgtagcgcatgctatagtgccaagcccaaatcatatacaacattgaacgcttttccaaggttttacattacacctacacaatccatatgtctctacccttggaagttgtaaacataaaacttcaacttatagcctaaaaatgtcctttgtgaagtcttttctgccccctttgtcacctcttcgctttcttggaatctttatcgggccttgtctcaacctatttaagatcgtgtatgaacattcattgagacgaagacaaagagcccaatgagcattgtagtatgttctgttataccttttcatcagtccccatgctcttcctatctactctatctcagattgacttttcgaaatctgaactcgctgaccgaaaattatgtgctgtgttataaatagaggataatatatcgccatcaatccccacgctggcttgaaaaacgaaaaattgcagacatcagccagttctgcttacttacaatggtggctgctttgatatatagtacactcagcatactgtctatactctgtcttcggcttctatgtatttcacaaggtctagatttcttttcactgtgtccgtgttatgctgtttcgggtggccgtatcacgatcttttcgctggtcgttcatatcatttccatggtatttacttcgtgatcttatatataaagtgcctctctttatggtccatcagtcggctgatcaagatgcgatgccattcgtgcctaaacagagcatgtctccccaaaaccccagcttgctgtcttttcccacatttagccgaatcgtcaatttgaatcatccttcccctggtctctttaggggcccaataatactgcctgaataacgtatggactacgaaatgtaagctacagataggactagccgaaagaatacgaaaggcagagatttgaaaaggatatgaggtgacccaccctcgagggagccggacatgggcgagcctggcaattgtggatgtgatggggctaggataataccttcttcaaccgctgagggagaagagtagctactgacggggttgtccaaacctactgaagcggcatgtgctgcactagcaatggtctagtggagagatctatcatcacagtccacccggaccgagaccccgacagccggctcatcgcggcctacagcagtggggcactctggtaagcggtcctttccctttgattctagatcggctttctgtgctgttttcatgtaggccatcatattcagtggcaattagacgaattccatttgacatatagtactttgtactcacaaggcggggaagatcctcctcttgaagtccagggcaaggggaattggtgaaacatctgttctcaaagagaagcgcaagactgccttctatttagcataactcaactgccagcaggatctcgttgttttgcacaagcttttagttgagaaatttagcataagatgtgaagtgagtttggtaatagcaattacagccgccagccagccgagcacggtacaggcatataaatggcaccggctcgatctacctctagtctgacttttgaggatttatatatgcaagttggtctcaacgaaccaagggtcagctgaaagtgtgtcgatctgacggcgatcaacagatctagggtttctcacagcagtggaaaacttgttttcctttttttcttgacctagcatatgtaaacattctaatagacaggtctatttatgtgtttatgtctcaaaacaatagaactataccagaatcttaaaactatatgacaagtattgtggagtaggtatagcactaagctagaaggggcaaacgaacacacagcgcagatgttgaacattggagaaaacgtgccatgtgtattttgaatccgacctggtctgctctttaacaatgccgtcatacaatgctatcatataatacagtctgataaaaaccagttaaactacagcaaaagcaaccaataatcaaacccccttacattccacaccccttggtttattgtagtagatctaatgacgcatgtgtagttactcatgtatgtagatcagagattgccaaaacttatgtatgtagatcgaaacattccttctagaaggatacctgaaaacaatcggttgctggccagcggtgaggtacccggatgagggttatgcttatcttgaccgttatcggtctccccctattattatcgccgcacccagccgagaacgagaacgatctctcataatgcatgcccgtgccagacactagtgatccgcgtccctgcccagtgcttggtgtatccgccggtgcctagcgactgactgacaactgagacagataaggttagatcatattggatcacggtcctaataggcaggagtcgctagtcaagtcttgggggcaaaagtgagcttcctagtgcggaatacaggtgcttggtgccgagtccgccgagagagaataatgagtgtagcgagctcttggtagcttgtggcagcctaatgcgagggtcacgcatggagtacggaggaaattatcgaattttaaggtctgatttctcttctttgtcctaatggctacatttaccttcggctggcctcattggttcaagtcaagacgccccgagaacggacatcggatgtccgacccaaggggtatcaaagtatatatcgtacagtatacgtacacagcaagaaaatgtactccgcactccgcatggtacatcatattcagaataacattgtcgatacacggggtatggagtatgttgtacgaagtatatatggagtcgacattgtctgaactggtttatctgcggagaaaggaaaagggaaagtggaaaagtaccaatgctcgcactagtactgtatctagtgtactccgtacagcaatttccgacgacaaacacctggggtgtctcacttctcaacggtcacgcattggctgctggccatcattggtcagataagaataatttggctcaaagctaagattggctaatttggtcaaattagcgtatcttttttcctttgtcataccatgatcacctgcgcaggatcagctgttcatcacgaacttaaaataccagaatactatacattaccatgcaataccacgcacagacggaaccccccgaacctctccacaaaaaaaagggaaaaaataaagaataaaaaatagacgagcaaataccagccaatcagaatcagcccaggcttagataattgaccctttggcttcgacccgtggaccctaccttccaaggtcgacggcgtccatcctgattgggttagcgcctgtcaattcatgttttcatgttttcagtccacggaggggagggataactaccatgcatggtattaataactatcgcctcccctccgttttcattctctttcgatcagacaacattgaactgctttcgttctaaataatcatcgcctttgcagtggatataatcttcacttgctgcctctcatttatatcaacatctaacttatactatcgccccctttttttgtttccccacattttccctcgtttcctgtggcttggattcaaatcattcgatattctgtcatttccactgtacataccaacagtacatatataatggttcgcttcgtgacacctttgctcctggcctcgctgtcagtgaccgccttcgccgcgcaatcctgcagctccagcagccagtgtgacgagaaatacccctgctgctcccgtgagtgatactccctctagatcgcaattgatagctaacaagtcattcaaatctagaatatggtgagtgcggtactggtgcctactgcctgggcggttgcgaccctctcgcatcgttctctctcgattcatgcgctcctatgcccgtctgcgaggacaagacttacaactggaacaacctcaacaattccgtcacccaggacaagtacctcggtaacgccagcactgccgactggacctacagcggaaaggtgaaaaccgaggatggcaatctgatcatgaccatgcctgccaacagtgtcggtactctcttcgccaacaaccactacatctggtacggcaaggtttccggaaagattaagagctcccgcggcaagggtgtcgtgactgcttttattcttctgtccgatgtcaaggacgaaatcgactacgagtgggtcggtgctgatttgaccgccgtgcagaccaactactactggcagggtgttctggactgtaagtcaaaagcaacaaggaatatctgatcccaataataaatactgacttgatgaaccaggggagaacgccggcaacatcagcgtggatggcgaggacaccttcaatgactggcacacttacgagatcgattggacccctgagaaggtcgactgggtcgtcgacggctccgtgcgccgcactttgaaaaaggccgacacctacaacgagacctccaagcaatacgagttcccccagacaccctctcgccttcaaatgtcgctctggcccgccggccaggccagcaacgcccagggtaccattgactgggccggtggtgatatcgactggaacagcgaggacatccagaccgtcggctacgactatgccatggtcggcgaggtcagcgttcagtgctacgatgctccttccgacgtcaccaagaccggcgacaacgcctatatctacaccaaatcttctgctatggagagcgatatctccatcaccgacaactccaccgtccttgcctcgctgggcgccaccggtctcgacatggatcttggtgctgacaaatcttctgcatcctcctctgcgtccaatagcatccccaccagcaacggtggctccggtggcatgaccagcaacatcaccagctctggtgaatctaactccagctccagctctggtacttccaccacggatagctcggggacctccacttcgggcttcacccagggaaccgctacccaagacagcggtgcggccagccaaaatgagcgtgtcctccgtggctcgctcttcggcgtcctggtggctcttgttgtccttgtgacaatttaaattttttgctggtttgatctatatatcagcgttttgtccttattattttctttcttgccatgcttattgcacagcattgggtacattttttgttgactactgtgcaactttgcttcgtgtctatctctgaccgaccttgaacaaacacttaatgaatacctttgttccttgtatattttttttccttctcttttttttatcctccttcttgtcccttcattaggttgtgatgttcaacggttgactgcatacgtgtctgcattttccctccattttattgtttaacatacacctccctggcgttcttggccgattcatgctctgtcggtttatttttgattgatgtaccactattctggtaatgacttgtgattccctgcacatgactggaaaatacccacaagctccctgtgatctttgttcatatttaatctctatagcttcctctttctgcgttaatttttatttgccgctttttgaccactgataaaactgagcccttattgtgtaaccaataagcttgtctggaactaactaggcagtctgccgggaagtgaccaatgagacatttcttcaatatttgagcatgcaaaatagatatgaatatagaatgataacaaacagcgttgaaaggagcatataaacatagaaaagaatgcgtgaaccacaaaatgactatttccaagaagtcatacccagctttacgccgatttctcagccttgatctttacttcctccaccttcaattcctccttgagaggctttcttgcccacacgcgattcctgaaatatatcagcatgagtaaatccagcgatccgatccgaaagcaaacttacgcaggctcataagcgtgaatacgcgggttgttcagctccttgcgcactttaaccagaaacacctgcacctcctcctttgaccacggctctggctctccaaagtgagtgagaagccacatcgcccaaccctctagagcggcgttccaatggctatgctggaggtgtccggcctccttcagtatattatccctggcccaacatcctagaggaatcttgtacttttcctcatgcacgtccacgaacccggcttcctcgatggcgctacgcattgtttcgtgggttctgagtgaccgtcctgctcgttcggagcatccgataaaaatgtcgccccaaccatatagctggtgttctttcgtcaaggtgccgtcatcgctgtagactcgcacgtctaattcgatttgttcgatccagccaccaggctctagggcactagtgagagatgaaagaaattagggcgccatgtctcggaaagtcgattagtagggaattggaactcactcgtaggcctgtttgtatagcttttgccatccatcgggagggaaggcgccatacatgaggcgcatgtggataaagtcaaacggctctctccatgtccactcgcgaagcacatcatccacctcgaagatgcagttcgggggcatccataacacgggtgggggaaagagatccacgccgcggacggtagctagttagtttcagtcaggggtagttcggtcagaaatagaaggagtagaatcaagaaattcaatacctagaggatagcgatcggcaacatcactaaggacttgttagagattctctttctctcaagaagggctacccgttgacatacattgcccaactcccttggccagttccgatgtccaagatattctatactccgtagttagcagggcgtttaagcgagggtctccgtataaattcaccttaggcgaagcgccgataggggagcggaacagaggatttggctgatcgtgatctagcacgagaaacatcaggtggctgaatttgttagtatcacatctctgaaaggtatggggacgggatgtggtttacccaatctcaaatgcctcaaattgctgctcgtcggaaggaccccttgatattgttactttatgtagaacaagatcgctgcatcgtaactaaccagtagtcatcttctttgatggcttggtatctgcataccgggttagtcttacaaagcatcttagactggaagtatactgaccttcggccgttttccagccgtccccttgcaatagcggacgctatggatgtagtatccctacatactggggtaagaactcgacttatatatatgatttgcagtgacactcacgactgaaggtcatgatgatccacgtcatagccagtggccatagagtagaaatcggggtcctaggtgagaggtgagaatgactatatcggattatgagattaccactcaccaccgcgatttggtccattttcttaaccattctctcgacacttttccaaatactgtggaagataaaaggaggaaaacgagggtggagtgtaaaagtgtcagcacgggaacaaactcccggggaatccacaaccgttaagctagcagggtgtgagccgaagccacagccctagagtatgaccgagttgggtctaggttgaggactcgcataaaaaaagtacgaggggaacggcaggatgctgttgatccatgtcagctggtccgtgtgggacctcataaagcggcaccccgggagccatgttcacttctgagtatgttgtacaggcagaacaacaagccctaaaccaacatcctcccacttggtattccacaaaacaaggctcatgagccaaattcaagctcattccataataggtggcctcaaagcttgcatctaccttatcacaaatcaggtaagatacgagcatacccctcttgggagcaacctcaagtagagatcttcgaaggataacccatgcaataagagaaattcaatggtcccttgagccgttttatgttgatagatgatatttcagtatataaatcaagtattgcctcggcatgagacgtgactacaagatatagcaatgtgagcgaaacagatagctagtatgtaggtatgcctttcatgtagcttcatataactcttgggatattcacggataggaacatttaagtctatcacagcttttaatactctttgtctatgtttggccctagcctccttgtcccattatctcaccatactggtttctttcttgacatctgcgtataagctgtatgctccaaagcagttgatatttccctcactaaatacctttacctcctacctcagactatactccagggctttcatcatgatttacgtaaataaaatgatatttgttcttgtgtggatggagcaaacagagtagcaacaaacaaggcttattcttcagctcacttttccttcattgtcactgtagtatatgacctggcttcattcactgtgctctatcaaaaacaggcttgctttaccattgcgcaaagcccatttcttcgtatactggactcccaacttcctagcatcgcactcaaccacaggttctctatatgataacaaaagtcatactagccagtctcatactacgcgacacgtcccagacttcccactacaatcaatcaatcgccctcacatagtgaggatacaaccagtaagcgcaaatagacattctacctcgaacagcactgacacgtaataaagctctctcaaagcagacgaacgtagagtctgtagcctcgcgtggcatccacacgagatacttcaaaatgtgtctattcatggagacccactacttcagttgcaagcatacgtgctttgagctctacctcttttgccgcgaggtcctctatcaactgaaccgtatcaacgaccggcaacagctcagagactacgatttgccatttgaccctgattgtcctacctgccagccatatacagtcaccatgagaccagtcacattcagtccggatgtgaattatcagagtgtgattttggagagcaatattgtgcatcggagggtggatttggtggcgagctgtcctaattgtcatacacaagcattgtgattccaatttatactttagccagaatatgggttcatgccgatagaaagtattgtggtgatgaagggatgtgcctattgaagataatttactgggcatctagaagccagaagagaagataacacccaaaataccaagcttatttctcgtaagactaatgttcgctgtacacgcgtgttcaagtaaatgcgagagctaaattgcatatatgtatatataatgatgatgatgatgaaaccccgaagtattgacagtgctgcccagtacagaaaattcacagaataggtaaatgccgagtggtgacaatcgtttagtggatagcaccacatccacaatcatcggcagatcgcttcctgaagtctccatggtaagtgtctagtccctcggcatggaaattcaagcccaggcgatcgcccatccagtcacttccagacttagtatcctgtagcaacttcgtgacgttgtcgacattgagatcaagataatcagcaaggaagtctcccacatcggtgttctcgttgttgccaaccaatggccaggcatccttggtagacgaagcgtagatgttgacgtcaacagctataacgaaattagcatactatcatagatcactgcttgagactatcttaccagaatgtccatgagtagtccagccaacctgagcgcgacggctgatcatgtccgcaaatacgtatgccgtagtgacttcggggtccgggtggagcaaggtattcacttcatcctttgaagcatcatcgatgccaagcccatccttgagagtttgccggatccaagactgtttactcaaatcctcggcgtcctttcctggcccagaaagatattccttcagttgagcggcaaggtattcgccggagtggtttgccttttccaggacattcggaagccacaaatactccgggtagctcttgtgcagctgtcgtgccgcggcaagaccaccagtctcgtggtcggaggtgctcacaatcacaccaggagtagagtcattctctaggaactcgagcgcggcagcaaatgccttgtcgtatgccagtacctcgtgaacctgggcggcaggatcattgccatggccggcgtgatcgatgcgagagccctcgatcatgataaagaacccttgctcgctgtcctcggtggccttgctcaaggccttcaaggcagtgcgagtcatctcctccaaagagggatagatatcattctgagtgcgtcgatcaatctcatacgggatatccccgctagcgaagagacctagcagcggtaaactgacattatcgccgcccttgaggctatcgaagccagcacgatcatcaatatagccaaatccattctgagaagcaaccttgaccaaatcatgatcatccgaacggcagctgccagcctgtgagttgggcaagaaatggcatcgcccaccgccaagcagaagatctaccacccgaccgagagggtgttcaccaacttcttgggcagcgatcagatcttcgtagttccgtaaattggcatgggcggcgaagcatgctggggtcgcatccgtcaggcgagtggtcacaaccagacctgtcttatagcccgccaacgcagcggcctccagcacagttccacaaggcgagtggtcgggaagcaccgagatagcagaattgtagctcttgcgaccgcatgaaaaagccgtcgctccagccgcagagtctgtcaccaagctagagcttgaccgtgttcgcgaagtcccaacgtagtgtttatccaagaccagaatgtcatcgaatggcagatcgtgcgtgtattgccggaagcttcgagtcagcgagagactggtaggtcccatgccatcagacaccatgaagatcatgttccgcttgcctgtcggcttgcctccagggccccaggtcgtgtttgacgcaagatggttgtgaggctcggctgacttgtgtgggtagatcgcggccagcacaatgaccaaaattgttgcaacaagggcccaggaaaatactccaatttcccgccaggaaggccaggctcgtcgtttgtcttgatgagtcgttcgctcgccggtcagaagagcgtagtcctcctcgtcatttcgaatcgatgagccatcggaggacaggcggggaggtaagagagactcttcccgcgccatagctgggatagagacagaattagagaagagtgaaaacagatgtgcgaggttgagagatttgattacggccttccaaggttgtgtcaagtggaccctgaaccccaggggcggaggtgaggagataaggctaagataacaaccctagaggtcgcgtgacatgtaactgtgtatggatgcaacgtactccgtataagaactacacctagcctttcgtaaaaccaagaatgaacggagaaaaattcttacattttgaaacaggctagttcatatacttgaacaatatttataatacatgtcattctcaagacaacctataacccctatactatagaggtctggccttccacccaataggaatcatggcagcagcaatctcagttacaccgcgctccgtcgcaagcagattgaactgtgcagccgcattccgggtatcgagaacatccacccgaatgcccagcgagttgatgtgacgtttagtttcgggcgagagtgggaacatggagccaccaagaccaaggatgagcatatctgtagtaaaatattagaaaattggagagtaatttggcagtcaagctcaggtatgtctcatccatggacgaaacgacatatctgagggaaacaaaaagcaagaagaaccaacataccaggctttggccagacaagacttagcaaaccccataccgactcatcaagctcaaactgccctttggagttgagcatggcatccttagcggcactgtcgctctctgcaccctggacagccttccatggccgccacgcaaatgcctcacctccaaccagcaacagcccatcgccgttggtaagcttgacgccattgttaagatggaacccagaatctaggcatgcatcaatagccgtcgttggcgcagggatgttgcccagcacgtttaacgcatcgaagttggtctgagtgtcttctttggactccgggccgcggtcgcgactgacgggtttgtgcgcgtgtgagcgaggaatcatgcgcgttggttggatgggtgaactatagttccgacgtcctgagggcaacccagtgttggaatttgagacgagacatggtgctgcggtcgctgatgggatctggcagaatcgagtcaagttcgaagtgcggcggctattggctagagaggtgcgtaagacgcgtaggagttgtggtgatggtgaaagcattgatgcgatatgtgggatagagcggctgtcgggttggttctgtatgatatagcttggtgatgtaactagtggctcggttggtgtcacgtgaagtaaaccttggaagctttctgtcggggtcttggctgagaaagctagcggccccggcctacatattgacacgcactaatgcgcctctacataagtttaatcatatcacgcactcatattgcaaggatgtagaaagaaaaacggttgggaattctatacaaaccgaaagtggctctgtgtggagtgagcatggactccatgatctcaacttgaagccctagtctatcagatagaaatgatgcacacaagcaactagttatgatccacgttaataattgaattcttcttatattaatattgagcctagcgattcatctattttgactttgcaggagtcccaaccccgaccctctgcgtctggattcatatggaacaaggacaagaggagagacgacaacatcgtacgcgtcgtaaacccaaaacgccaacagaaaaaaacagataacgagggggaaacgatacctggaagaacgaacgaactgaaaaacgacaaataatggaagaagagaaaagcagattatgtgtcacccctcgagatgagacatcaaacttgatgtcatgctgcctccgattgctactgcctctgaatacttttcttgtaaggatatgaagaaaaaaaagtatgcatatgtgaaaaacaagagccattcactgaccctattttagcggttcgggccttgctgattttgttgtttcagcgaccgaacaactttgcggtcttcatccgactgactagagctgctatcatcgcttgtggttgcagtgcggattcgctcggctagaacctgagcttctgccatagccttttgggcgcgaatctgtttacgccacatgctagcatagcgacccttcatagccaaaagctcttcatgggtgccgctttcagccacttgaccttctgacaagaccaagatacggtctgcggtagtgatggtgctgagacgatgagcgatcaccagcatggtgcgaccccgcgagagagtagcgagtgccctctgaatatgctcctcggtatctgtgtctagagctgcggttgcctcatctaaaagaatgatgcgcgggttcttgatgatggtgcgagcgatagccacacgttgcttctcgccaccgctaagccgtaggccacgctctccgaccttcgtgttatacccgtctgggaaagcaagaatcttgtcgtgaatactggcagcgcggcaagcctcgaaaacatcttcatcggtggcgtcctggttggcgtacttcaagttgtacatcaaagtctcgttgaaaagtacagtatcttgaggcaccacaccaatgttctggcgtagtgaatcgattgtgacatcctgtacatcatgtccgtcgatacagatacgtccattatcggagttgtagaatctgaacaagaggcggaagacggtggacttacctccgccagactcaccaaccaaggcggtggtagttcccggctggcagtggaaggtaaggccattcaacgcgggcttacgcgcatcgtaagcgaactcaacattctcgaatttgatgtcaccattgcatacggccaatggggtggcacttgggctatcgaccacagttggctgctcacggaacaattctagcagtcgttcggcattgatcaatgcagattgaatagaccgatagaatgtgccaaagaaattgagcgggccctggagttggaccatataggccagtagagacacgaacttgccgacagggcgctgaccactagcaacctggtatgcacaaatgaagcacattatcaacaagcccatcataaacacggtgttttgacaggtgttcagtagtgttagagagaatagcacgtggtattcggccttctggaagtcacgcacagcaccccggtaccggttgaattcgtactgttcggcattgaagtatttcactgtctcatacgagaccatggaatcgttcctagaagaagcataagttagtaccacatttgtctcgaatctataacaaaagcctccttccaacttacttgacagcatcttcttgtcgcgaggcattaaccatctgtcttctgatctctgctctccactgggccatgcgaatagtgacatagagatagccaaaagtagaaattccgacagctagggcatagtagacatcgaatgcgaccatgaagtacacaatcgcaatgacaaggtcgacaagcattggcacaacctgaaaggtgacctgctcaaggaaagtattgatcgaactgcccttactcagagcggacaggacttctccggtcttttttccgagatggaagtctaagctgagactatggacgtgttcgaatgcagcggtggagagctccatgtaagaatactggctcacgggaatccagaggctagagcgcagagagctgagtaggccctggccgccctgcaaccaccggtacaacacatacaggcaaatttgaagccatggcacatggaagtccccaccctcaccctcgctcttagtaagagaacctgtaatgagtccgatttggtagggtaccaggacgttaacgactctctggcatatgaggagtccaaaacaaaaggtgacaattagttgcagacggcgagatttggacggccacaggtatgggaaaaatagcgagtacccgctcaggtactcccaccagctagtggaagggacagtcgtcggacgcacccatggatcggtaggtttggaattttcggggcgaggagctccgttcgtcgagccatatgaatgaccattggcagttccgtttccatgtccgttcccattgccattttctgcaccaccggaatccaaaagtcccgtggcttccgtgactccattcgctccctggcttgccttcccgtggctcttcatgctgaacgattgacaggcgtagagaagaaccagtgcaaacaagataaggatgcgtacactgttcgatcccacttcgagggactcccataatgtaatgcttctgcggatccgaccaccttctgggtctccgacaattggctcgtggtgaaccgaggtgtagattgagagggaggtgctaacaataaccaattcgatcgggatggcgacagaccaacagacaaactgggcgatcgtaggcgagggggatgtgtctagcattgccatgagcagcactgcgtagacgaagaacgagccgacgacgtaaatctgtaataagtgtcaacggctgtcgagcagcaccaaaccatctgaatagaacgtaccacgaagggctgtcctcgccaccagttctccgacctggccgtcatcacatgtacgatatagatagttgcatccgcaaggaaggtcaaaagaatggccgcggagagcaagttgaaaactcgtttgacgttccgcgagaactcctgggatttgtaggcaggcacacttcgagttcgctgagggagtggtcgccctcccgggccaaagtattgagactcatgcttgctagctttcttcgcagcgatggtagtactagccacgaaggccacgacaaagaggataagaaggaaaattgggtaagaggtgcgcaagtattccagcagctcaagggctgcatgaggatccattgcccactaaatatcccggaaatgagtgttttaaacaaagtccatgacagactcctccctcgaaagaaaggtaagaaagggagattgccgggttcggatcggaaaggactggacgacgggtatggcgagagatcgacgcgaggaatgatggcggagaaacaacctcagcaggtttccacgtggaaagtttaggaaaaagaaacaagttgaattatgaagattccacagaagcaaacgtaagaaaagaaaggaaaaagatatacgaatgcttattcttcttttctcactaaatttcttattaaatttattttttttcctacttggcttttgcctccaggatttatttttacctagaaggaagggattggatgctttttaagccaacaagagcagtgctataactagaacaggaagaggcaaatatatggaaatattctccgtaaggcatgtatatatagacatgggtagaatggctgaatgacggtgtggattggatatgtatgtaggttgctgcagctaaaaaaataaaaatggggtcacgctgcaacttgccgttctctttaatatctatatcttctttctctgggttgtcctttagggttctgtctgtctctggtaatattggaaaatgtcctggtatgaattaaacaatctacagcccttcctgcccaatggttggtgttgaaattgtctcaaagtgaaaacagggggggtagagaaggatcgtcgatcgatcgagaacaatccgcgcagatgcccatgtgatgacttcactaagctgccaaggaacataaagcaacccgaatgtattattttgcctctcttggtgtcttttagtcacgtcgggtggccaaggggcgcagttcaatggccacggatcgtagtacccactgatttggtactcgtatatgatgtacgtaactagtttgtgaatatgtcatccctgaagatctatgaatagttatatatttccgatgtatgtgtctcgtgttccacttcctaactggttgaggcaaaacagaatgcttcccaggtcttatatacaactatatactatacagtattataggtcttttaatcttttaatctatagacatgttcccttgaagaaaataaattgtaagttcacattcgaatctgatccctctcatgtgttgtcttctagaccgcccttaacatatgttcaggcccgatggctttcaataggtaaggcttgaaaaatataatatacattgtgagaaaagtcacgtagtacaactaactgatgccctagcttcatgtgtaatgttataactatcgtccggtatgttgttaatggatagcagtaaggcatagatcggtgcctcagggatctctccctcaccgcttgcatttcgatgatcttcaactctccgcatctttttccctcgaattcggtgatcgcgttgccataatggagacctggctataaaccatgtcggacctctcaggttcgcaatctccgatccctcctcctccccctccgccacaaaagtactccaatcgcgccgccaatgcccttgcgagattcgcccaacctttcttctcgggctcaagaccacctagttcccaaagcagtcgcgcggatggtccccggtcgatcagatccaaatcactgtaagtgttgccgctctatcacaccgctctgacacccctgctcccgtgggttacttttccctcttttgcttttttttttacggatgtagtgaccaaccccaccattcggtcatcggagctagtgtgatcgggcaattgcatctgagccaatggaatcttcaagtttctaatatttgcttctgtaaagaccaggagaaccgcagactgtaacccacaagacaggcatcgcaatcacggctttggacatctcgcccgagcggacacatgcggttatcgcaggcaaggagattctcaaaactatccaggtctcgccagaccgctcgtcagaggaattcaatattcgcaatgccgtcattagctatgcatctacccaccacgacacgggtgtttcgatgccacacaaggatcaattgaatgtcaaggacgtaaaatggtcacatgggaaccatgaccggataatcgcaaccgcagtcgcgaatggtcggattgtcatttacgacctacatcggcccggcctgcaattgtgtcgtttccagggtcacaatcgccaagtgcataggcttgccttcaaccctcatcttccttcttggctgctgtccggtagtcaagatggcacaattcggatgtgggatctgcgatccgcctctgcaaatcgcggaagttcaacgtgcggcagcaaatatctgtatcagggcaacagcgatgccatccgagacgtccgatggtctcctaacgatggagtcatatttgcgactgcttcagatagcggcgcgatccagatgtgggattaccgaaaggccaatgctccactaatgaaaatcgctgctcatgatcgcccatgcttcgcagtcgactggcacccagatggaaagcacattgttagtggaggcacggatcgccaggtaaaggtctgggacttttctttatctgcagagcgacggcagaaaccggcattccaattccgaacgccacaggcggtcacaaatgtgcgatggagacctccctcttgggttggtgagtctgcttcaggacaatggcaatcttctcaagttgtcacgtcctacgacaaagaagacccacgcgttcacctctgggatctccgccgcccgcacattccattccgcgagttcgatcggtacgacacacccgcatcggatttgctctggcgctccaaggatcttttgtggacggttggcgaggccggggcgtttacccagaccgatgttcggtatgcgccaaccgtggccagtcgccgaccgatgtgctccgtagcctggagtcccactggcgaatttgttgcgttcagtcaacaacggcctaggcgacgtcctctaggagtcaaggccgctgaatttctacggctcgacgatgatgatgacagctctggcgagagatcactaagtcaaagccccgcagatgacatctttgatgaagccgttttggctacttcccttcgaaatcggcataacaaatcggcctcgattcgaccatccaattcctggggcagtactccgcccggcggagtagattacataccagtgctccctctagaacaagcactagccaaactcgccaccccaatgcctagccaggtcggaatcatcacaagtattccggatgtcacgaacgactcagccgtctttcggcatttggcaagccactatacgccgttgatggatgagcacagcgaacataaaacgcagaccgacgtcctgaactctttgattgagtcactggaccataacgcagaatgtgcagatgaggtgtccctggccagattggctcagacttggagaattattaaatacgccattcttgaagagctccaacgtagagctagagattatcccaaaggtggtctgaaagataggccatccaaggatgggggcttgatagaaaggtcacgacccgatgatggtcggcaggacagagtgaaaagtcggttgttcaaagccgtcatggagacggtccccgaggccgagagctcgtcaaatatgaccacaccccttgtgcgcccattgccagattccccgaaagactcgtggtcgagcactgattcccaaatgccctcgatgagcgatgcagtgatggaccttgaccctctcccgccatccgtcttgagtgatcataatagttgggcaatgtcagaccgtatacttggacgacaatcatcaaccgatgacgctcattcttctcaatatcgatgggatcctacacaagaagatttggacatagagcaacggtctgcgcctcgggcaattgccggcaaggcagattggcgccgtcgtccagacttctcccgcgaaaattccgaagatgactatgacctgaagctggaaaacaaacgtgcagcgattcgtgactacaagcaattccccaaaaaaccgttgaccctcgaatcaccattggaatttaatcggcctcctcgtcctgaccgttttagtcgacatgattcctcggagagttttcccatgttctctacatccaccgacagttcgcacccatccaagtctattggtgcatcgtactcgtctagtattgaggcatctaaatccctggatcctgggcaatcttccgcagcgctgagaagagggtcgatgctagcttccacacgcgaggaatctgaggatgagctcttcgaccagctcatctcagagactgaccgaattcatttggatcgcccatcaagcccactccctttgatcacagaatcaacgccccttgaaagacagcaacctttcccacgagacgataccctcaaccccggcaccacgccttattcaacagtgggcggtatctcgcgtgtcccaattccactcacgccagacggaacagacctgaaaccgtggggtattgaagcaattatgaaagaatcagttcgatattaccacagcagcagtagcttagttgatatccaaaccgcggcccatctcctccagaagatgcacgttctttttcgggactgcgaacaaattctcccatatgaagaatgcgaaatggtcttcaaaacttacaatgagcatctaattcggcactcgatggacctcgaggcagcagagctccgcttattttgtgtgccaacatatcctgccgtctacgaatacacccaggcagattcattcatcaacgtctactgctacacgtgtcagcgaccctttgaaaaccccacccaagataacagccgctgctatcgctgcaacacacctcaagcaccatgctctatttgtatgagccttgatccacccccagaatgggtttcagagcagcaaactccgccaatcgcttcatctaccctcacgagtcccgacctagacttcgaaaccacttcgaaccattcgtcacaatcctcagttgccactgaacccgtcccagcatcggaaatcgatattatggagcctttcaccgtaccgcgacccaaagggtccgccctttggacctggtgccaaggctgcggccacggcggccatgtagcttgcatcacaacctggctcgttgacatttcaaccagcgaaggtggctgtgccacagccggctgctcgcatgactgcgggcctggcccacgtcgcgaactgaaccgccaagacatgcaggcggaatccaagcgtcgcgactcggctagtcgctccgccggtgtcgggctcgtcaagcgtgatccctggagtaagggtgaaagtaaggccgtcgaaaaagtgcgcggcatgctgggtattgccggcattgctgctgccaccgggggcagtggtgctggcccgaacacttcgacgaacaatacttctccggcgccgggcgaaaccggcgccatgtcgcctaaaagggtgcgtcttgttaccccgattgagcaagataagggaagtgttgccccggatcgcatggatcctccttcaagggactgagcttgagtcttgcgtaacactctgtgtaccattagcgcggttttttttttcactttacgtcttcacttcttttttgtcttcttcttctatttgattccccaatcgcgatacttcaatgaaacaatacacggattcaagtacacgcgtatggcatacagtgtacagccctgaaatgcatttattcctagcacataatagataatgtgtcgtatgtactcatagcaaccttcgccggattgcttgaaaaggacttcaacacattcttcaaacataatatccccactctccttcgtctagaacctccgcttcttctttgcaggagcttttgccttggcctcgagcgacctcttcagttcctcgcgcttccggtcagcgcgttggtcttcagtctccggttctgcaggtggagctggagggatcttctcttttgctgatgtgggcaatggagactcctcctttttaagagcttgtcggtcagccttcggtttagcaggtgtagctttctcgggtgacatgaccaccgtgtcagatgtaggtagcggcgacttatttcgagcttcctcggcagctttggctttggctttgccgcctatcatgccaagtttcccgggacgtttagcttttgtcgttgctggtaccggtatcgacgatatcggaagagaaggatctctgctaatcctttcttcctgttctggtgactctgggggtccttgggattttggcgagtcgcgggcttgtgctggaggggaaggggctggtgaaagcgagggctctttcgcttgctttttcttgccgcctatcatgcctaatccgccctttggctttttcggtgtctctcgaacttgcgctggaggagaaggtgctggagagggagatggtgaggcccggcgctctggttctttcttgttcttgccgccaattttacccaacccaccttttggtactttcggtatctcctgaactcgcgctggagaagggactggagacggagatggcgagggcttgcgctctgtttctttcttgttcttaccaccaattttacccaatccaccctttgttactttctgcgcctctcgagcctttagctctggtgcggcgggccctcgcgaccttgaaacgctgggaatgtgtctttgacgaggtgctggctcagactcggattcggagtctgatgctgtggcttcgtcttcctctgaaggcaatactgacgggacaggacttttctctctgggcttttgcttgggtggtaatgcttcgcctttgccatgttgggatttgagtctaggaggagtttcttgtcgctagatgaacggagttaagctatacatgttattgtgattagggataactcgtagcatacctgaaactcatcgtcatcgctactcgctgttgagtctgctcctgtgtcgatgttcttgatttcaactggctttgttctatcttggtcgttggaaatttcctcttcgatgggagaggcctctctggcgctagtttcagggggtctcgcaagttgctgccaccattcgccttgtgactgagtgaaagtatctaaagcacgagaatcaccggattctgagatctcatggagtaaattggtagctagtcccgcccgatgtgataatcctctctcagcgagccaagtctcctcctcaaacggcgcgatacctttcacagatttagcagcatcagaacgcgtaatagccttgcgagacatgcgcgaccctgcagcgctaggaaacactgaccctagatccacgccaagtgtttccattttgtcaaataacttgccaagtacgtagtctttctgtttgatttggttcaagagcaaacgttggcgggactcccactccgcctcctctctcaacagcggaagtaatagagtattggtcaaggacgacaggggttcctttaataacttcaaagaccacttgagaggtttcaatggggagggcagcttggttgttgtcatgatttcaagggagttggtttgtgttccactgcttaagattgcgctttcattgccattttgcaaagcttctccaattgtttccaggagcacatcgagttgttcttggtcctctccaggatcgatcgttgtgacatcttcctccgctctcttggtgatagctttacggggtagccgctctgaccagatataggtgaggtctgttatgtggatctcatagccttgtcgggtccaggtgtactggaagagcaaaggaggtattccctgctgggacaagtgaagacgctgccatctggaaggcatggttgcatgtttggatgagttgttgatttaccaatgcggagttgtgaagttccaaagttgtctcatatagctgcctaggccataagggaaggtttgccgcccgctcgactttcccgctgatctcccgaactgctaacttcgtttccaacatccaaattacatgttcgggtcgcttacgcttggatcctcaatcctccttatatccttacagttcctacgatgtctgcgcgattcccaaaccgatccgactcaaagcgcagcaggtcgcgatccccgtcctcgtggggtcagccccagaaatatccccgtcgggacgacggagaatggcgcaaccaacaagactcggatcgcagatggaacaatgagagatcaggcccttcgcaacagcctcgcaacatgcgcgatcaagtaaggctcaacttgatccaggaagaccagcaagagcgtgaatgggtcgcgcaggaggatgtgttcgtgctcaagcaggccaaaaagaaagcagagattcgagtcaaggaaggacgcgcgaagcctattgactggctgacagtcaccctccgcattatcgatcctacgcgtgatcccttggatgacgagatagcagactccgatctggatgtcgtggacccggacggtgtgtttgagggactatcgcagacccaactacaggacttggagaaggatattgatacatttgttaaccttgagacaaacgcaaagaatcgtgaattctggcaggtaatttttatactttctgctatcgactgggccgtcctgctaaccaccgtcccccacagactatgaaagtcatctgtcgagatcgtcaaaagaccattacacccgagagtcgcgcattgaattcagtggctgctgacattaacaaactactgagcccaaagtcctacgagcaactccaaaacctcgaagtgcaagtgaaacgaaagttgaactcgaacgagccgatcgatacagattactgggaagagctgctacgcagtctggctgtgtggaaggctagggctagtctgaaaaatgtttatcaagctattattgatgagcgtgttcgcgacctgaggagacagcaaagacaggaagccgaatcaattcgggaaaaactagcacctcttgctccggttgtcacggcggatgatacaacaaatcctgatgagttcgagggcttggatccagatccaatgctccagattcgcccggaggacaaaggcttggaaaccatggacgagtccgtatttcttaaccaagtggtaggtttggggcttcagctcatgcatcccaatccacattctaattaaccgcacaggcccgcgaacgccagaaaattattcgtatgggtttcgtcccactacggcaccgagctgcagagaagtcctccgcgatagtgtcgaatccgacatctaccaatgcccccacgacctctgtatccacgcggttctcgtccatcccgaatgaggacttctcgcaagcgaccagagcgctatatgaaagggagctcgccaagggtgttagtgagaatgaggaaatatttacgggcgaagaggccgtgagcacaagctcacaatctcaatgggccggtaagcatcgcccccgaaagccgcggtacttcaaccgagtccaaatgggttacgaatggaacaaatacaatcaaactcattacgaccatgacaacccgccacccaaggttgtacaaggttacaaattcaacatattctaccccgacttgattgacaagaccaaagccccgacttaccggattgagcgtgagaacgggcgcaagcgtggcgagtcatcggccgaagcgggcgaggaagacagctgtcttattcgattcatggctggacctccgtacgaagaccttgcttttcgaattgtcgacaaagaatgggattatagtgccaaacgagagaggggtttcaagagtacatttgacaaggtatgctgtgttaccaaatgatcccccctgttcctcaactgacgtaatcctttcctttcagggaatccttcaacttcacttccagttcaaaagggtaagtcgattttttctctcttacggccattacgaagataatactaacagcttgtctcagatctattaccggaagtaatacatgcacgaccaacgatttccacatgggcgtcatatcgaaatggagagagtgggttatggtgtatgcagggagatattcggggggtgtattttccagtaacttgatacccagtgaatcaaattaaacctggattgattggactggaaacatttccccgccaacgttctcgcagaataagccggactttatatcggatatcagatgcttgatccaactgcttcctaaatttgatgaccctatcacctttcctttccacctctatgatcgtctttcagggggaagccaaaacattcctcgctcgccttgatcccgactgacgtattggcaccatatgtctattttctcttttatttttctgctaccggggtatttgcaacacgggggacgttggggatgtcctctgggtgacactatcccggcctgcaggagcaggatgtattcctcacttccggctggctagatgcaggctatgaaaaaaagaacaatttgatacaaaagtagaataccgcaccggtttgcagtcaacttctagaaggcccgggatgacgccggtgtaggtgaatgccctgcaggctcccatccgcctatttgaccctttgactatccccttctagctctaggaggcatattccattcgcactagtcgcatgtagcatgtaacatgtagtaccagatccagccactttaacttcctactcattggccattgtctgtactatgaatctccgttgcacgacttgggcatctaaggtctttttcagaatacagagtagagctcctataatacaagaaaaaataattccattagatccagatcgtctttttcttggagttaaatgcatctatgaggttatttgcagagaaaagaaagaataagatgtgttggtatgggatctttgaattatacagctccaaatcatctgaagttgaacacacacacatcctttgaggctgcactcttatttgttttcctccccttcccattcttattttcattccctcctcttcctcttcctcttcctctgtctccaagatttacgtttgccttctcatatcatctcccacacttccatgcttctcttgcatttcccttgctactcttctgtcatccaacccatcaagtcactctcgcaactggactttgtcttgcccaaacatggatttcacattccattcggatcacttcgacagagtgcagctttcagaccaagaagactccaaacctgatctcccgtcgcaagcacaagcgctatctcagggtactggcaatgccacgatgaatcaattcagcgtccctgactgggcgagatggagatcacagccagctcccatccctcctcgatattatcaaggttcgagctattcccgtgttgctgatggcgagccatacggcttaggcccgttgtctcaagacctcatcggggatccaaatggatatctcaattcataccgctcgcatgctacccccaccttgactggtacaccgtcggggttattcttccctcaggctggagagagccactcagattggccacgcctgcgacctcctcatgtcttcagagaccagccatacaactaccctcagttggaagctcaaccctttcaagactccccactgtcgccgtattccgatgcctcctatcattccccgcagtcgctcgctgcttcgagtccggcaatgacagctcagacagcagaccgtctctcaccacgttcaagctctggtgacaatagagaagagcgtcctggccaccctccgtattctgttctcatctaccaggccttgaaggatgccccgggaaacaagcttccactccaaagcatttactcttggtttgaagcgaacacggacaagggtggagaccccaacgcgaagggatggcagaacagtattcgccataatctctcgatgaacgcggtaagtctcattcttcataactcttactttcacttccctctttctttcacttccttgttgcaatatgtttgattgggcgtctgctatattcgatatcaatactaaccttaactctagggatttgaagccgtgaaggaagaagttggacctggtaagaaagccgtgaacttctggagactgacgccggaagcgatcaacagcggtggcatccaatcgactacccgataccgcaagctccaacaccaaaagaaaggtgtgagctcaagccaacgtgggcccgcacgtcagccatcggagtcgaagggagtccacaccacgaaggtggtcaagtcacgcaacaaagccagcgcccatggcgagcgcgctgaggcacatcctcaggaaatgaccagcacaaatcctagtctggggagtgaatatggtcccacgagccttccagcgatgcaaagatacatgcatcaccctatgggtcctgttgtcggatgcacccccatgacacctggcaacgatgcgctttttgttgataccgaggaggcagggccggcatttgacgcggggcataactatgactggtagctccagagtcgggcttccacgctcgaaggtcccggtcgaccatcggcgtgagaattgaatggaaaatggaaaaacaaaaaataaaaacaaaaaaaaggaggggaggggagcggaggtgtggtgggagggatggaacaagattcagcgaggagaacccgatggttatgttgggttccctttcgggtttggttgtttttgcgcttttttacttgggaatttcgtacactaggggcatggcgttatttgaggcgttgtttgaattcagaatgtgtttggcgggcgttccacagagcgagcatcatggcgaaggagatcgatctactgtttttcactttttcctcatgactacttttcttcttctgcttcttttctgtgcctcagtcattctggcatgagcaacgcatattttctcttcaagtgtaccataagttagtagtggtgtttgtgagttgaattcgtgggatctaccacgaaggcagagatggtatcgaccatcatttttctgtcatgttcatcaatggatcttctatgagacgctttggttgaagcatgcatatatctgtatttcctcgcttgtctcgagtcccacatgtctttagtttattacaaatgtgtgtcattggtatttttaggcatggacaatgccaaaaaaatagaaattagtatacctctactacccagtccctgggtttccgtacagtaaatattgaatcccccgggccaatatattggagttgttcttgtccgtagcggactacatgctgtactgctgacaatgcttcatatgcttgcacggtggtgtctcaagtgacaggaatagcgtcccaccatagataaatgagaacctgtgaataacactttgtttcttatatggtatattttcccgcccctctttgctagtctcctttagtctctattgacacttgggctctgtgcttaattagccacgctgagcaatcccaccaataccccgctataccactctgctggcttgggtagtaggtcagggtgctggggtgatgcagacatccttggcagcatcggctgcatcggttgctgcatgttgccttgctcatgatcatctttcctccctgtcattccccaatttccccaagaggacggagtccgacaccctcgtttttagctcatattttgtggggctaaagcttcttttttttttaccagagtgtgttcccaagtagatcaaccctaaggagatctcaggcaagatataggagctcaattgtagatatgtcatgtgttatagttagggcatattaacatactacttgcattatcattcccttctcaagtcactatcctccgcaaggacacttatctacaggtttcgtagcgcagtcgtagctcaggcacagccccattgttcaatctagatccgagaagaccacgttatatgtatcaaatcaagcccaacccgggttcatcctaaatcgattttgatctatcgaattatgtcggaaaggaacaggagaaaagttatatactctgcagatctcttaatttttaatatgtatggcatcaattgatacgggtacggaaatgtcacttgcgtatgtacttaatagccgacgggttgcccagcctgctggaatccgggatttgcagacatattccggtccgcatcaggtttaccatatagtttatgttgatagcctttgatagagcggttgtatttgaatatataatatgatgtaaccatttgtcttgtattctgacttgctattcttctgacagaacacgcacgaacctcgcccgttgggcgtttgcgggatggaacagcccagttcaatagctgtcaatcctgcaaacgctcgagcttcctttgataagcgccaaccctcggagtggctaattttacggagcaatgcgacacagaacaatcgcctgaccgcttcttgggccgatcccaattgtctgttgtcatccgtaaccctagcatcatagagtgaagattcttcagttctttgctttttcatagtaaagtaaaagagacattcggatcctggccggctactcattctattggctgcttcagaccaccgggaattgatcgaatcacagctgtcatgcactttacatatgcgttacgtacttggtagaacaatggaagtatagggatcgattccattggtacacctttagcgacttctttcactatatattgagctagacttggtggcatagagatactatatctcctttcgggggatatctattatatcgtcacacgctagcttatgatgtatgttgatggataaaatatgaaggaaaataccagatgaacctccagattccacgagagaaatccgtagttttgtcccggtcttgccaatcgtgcttccgtccaggctcttttcaacgatggaagcatccaagttctcgtttgtacagcaacactggcctgtggtatcaacctccccgcccataccacgacaatggagatctatcgcattctgtttcatcgtaatcctcaacagatggtgacaatttggcatccgcattttgtacctgatggatgtccaccaatcagatctcaaaaataaatccaggcgttcaagtaacacccacgctcggaccgagctcactgggtcttgctctagctgccacgaaggcatcatactatattttacttccgtttgaaccttaagttaagtaaccgtcctttttatgtagtacatgtacttgtaacgataaagctggcgataaactcggtgtatcttcaaccaatctcatatgcagcctcgaggaggtcaaggcacaaagaacctgcaagatgaagctcctgcctgaaagagtagttcaagatatcggtaatcaaggataattatgccactatatatgattttttcttcgattgattaagtgcaggaaaaccaaattgcttttcattgtatttcccgatatattcaggactagccaacatgacgttgcggataacacctcaaactagattagatgctctgtagtgaaggcctgagagcctggctggttttatttaaccctaaacctaacgcatgcctggtcgaggtctcaatttgctaaagagtcaaactccgcggacaaaaaaagacccccacaattgttgggacaacattttataatcgtctatactgtagtagtgggtagtagtaaggagacccttttatctttccgagattacgaggtgagttgcttagcgaagaatgccactgcttttcataacaagcatcgaatttgagtgaagccttgttgtcattggaagatcggtatgatagaaggaggtgcacgttcatgtccaatgaaggtgctttcgaactgggaatcctgttttaggtggttgcgagaacttttcggattccgtgattccgtgtctttagcacccaaaataggagcctctgagttgatttgagaaaaaagggaaaaagttggtatagacagcaaggatgttgcatgctcttctcttcatgctgcaaaaagggttgtggttttaaaagacagcctagaccaatacctcaagtttctactatatataaccacgatatatattcctacattattgatgcaacaggggctgtgatagccttcaatattagacaccatatagactcacagctgtgtcttgttcaattacatgaccacctactatgctgagtgagttgacctcttgggttcacaccataaaagcaaggcttaaagtaattgaccagaccatgtggggtcctaatccgaagaatgtatatgcaatggagggtactaatgcaactataaatgagatcaacaccgagatatacttcagccctggagaataggcaaattacacccggctacggtggccaacataaaggaaactattgttctaaccattcacgactacattatatccaagcctgagtgcctatgcctggtgcagatcaacagatgctgctggcctgaaagataatgcgcaaccttactcaaacgcgtcatcaagcttgacaccgaacaagcacgaaatgtacgaggcttccatgcgagaggcagattcaagacaccatggagataattttagacaacttgattcgacatgtcaggggatctctcatgaaggcaaatgaaattaattcatttgcttagccacgagccttttttttggactcgcatgctagctgttcctgttcatctttaatattttaagagaaccattcccagccgtttttcccataacgttcgctccaccgtaaaaggacaacaccgacaaaaagcacgcttagcgcttggcggccttctgctgggactccttgaggaccttcttgacgatcttctgctcctcaatcaggaaggcacgcacaatgcggtccttgacacagccagcgcagcgagagccaccgtaggcacggctgacattcttcttggggcgcgagatctgagagtactcgcggggacggagggcagggatctgtaagtaaaaaaaaaaattgtcagtcgatctgactccgaaattcagcgagacggttgtatggaaattgtagcgtttcggtcggccattcgttcgcatatccgtccatccagacagagttttttttttcaagtcgttcggttggcccacacgcgatcgcacatatcccacacaaccgttcaaaaatgcatcagggacgccgggggagtactcacaccggggagcttgatgccgcagtcaccgcacttgggagcagtacccttcttcttcaggtgaaggtaacggagctcgccgccgggggtcttgatgatgcgaaccttgttggaccgcgtgttgtacctattgaaagcaagaaaatccgtcaataacttgttcgaaaaggtgatagccatcccgatatgagaatcatcgtatagatcatggtggtgcgagggagtggccttggaaggaattttgaaacgtacgggttccggcggcgctgaaaatcgagttagatcaataattttccaatcggtattttctcatagaactcacgtattgcaatctgttgttggtcatcttgactgtacttgaactggtcaagggcggcagttgtcggagttgtcgtgaagcagaatgaaatatgtcgagatgggtttgtgtgggtttctgcttcaaccgacgctagcgcagatttggcgaggctgcgctagtcccgatgcggaatagtgccagtcggagccgccacttctcaaagttcgacggagaacaggagcagagatagtcacatcgcgtaggggatctggatctctatctttgtcgcgttttcatcttaatcttccatcccgccatcacctagctctttttctttcagttgtattcttcttttttactagctgaaaagtcttgctacacatgacctccaacttggcttgacgcgacttggaaccaacacaacctctacgagggagggttccatccatcaatcacgatcatggcctcattgcctccccctcctccacctccgggatggagtgcagctcctcctatgccgatggcgccgccgcccccgggctaccaaccaccagccgacccgaatgtcgcaaaatttgcgcagaagaaaaatgaatggctgcgcacgcaacgcaatcggttcggcgagaagcgcaaagcaggatttgtcgaaacacaaaaggctgatatgccaccggagcatctgcgaaagattgtacgagatattggcgatgtttctcagaagaaattcacaaacgagaagcggagttacctcggtgcgctcaagttcatgccacatgccgtcctcaagctgttggaaaatatgcccatgccttgggagtcagcaagagaagttaaggtgctttatcacgtcaacggatgcctgactctagtaaatgagacgccgcgtgtcatcgagcccgttttccacgcccaatgggcaacgatgtggatgtgcatgcgtcgggaaaagagtgaccggagacacttcaagcggatgcgtttccccccatttgacgacgaggaaccacctctttcgtggtccgaaaatattgaagatgttgaaccgttggagcccattcagatggaactggatgaggtcgaagatgcggcagtttatgaatggttctacgaccaccgtcccctgcttgataccccccacgtgaatggaccgagttacaagaagtggaatttgtctcttccccagatggcgactctccatcggctcagtcatcagattctgagtgatgttgttgaccagaactactaccacatgttcgacttgaacagcttcttcacagctaaggccctcaacgtggccattcctggtggaccccgcttcgaacctttgtataaggatatcgatcctaacgacgaagatttcagcgagttcaacgccattgaccgtatcatcttccgtgccccgattcgaaccgagtaccgggtcaccttcccctttctctacaacaccctgcctcgaagcgtcaaggtcgcttggtactcccatccccaagtggtctacgttcgcaccgaggatccaaacctgccggctttctatttcgatcccgtcatcaacccgatctcctcccgctccgtcgcacctaaaaatatcaccgtcagccacgaagacgaaatatttgggcctggcaataatgaagacgacgaatttgagcttccgggtgacgttgagcccttctttaacgacgaagaactctacacatccgaaaccgcgtccgccatcgccctgtggtgggcccctcacccattcgataagagatctggcaagatggttcgtgcacaggatgtgccgttggtcaagcaatggtacttggagcactgtccacagggtcagccagtcaaagtccgagtctcgtaccagaagatgctcaagacctacgttctcaacgaattgcacaagggcacccccaaggcccagagtaagcagaatctcatgaagactctcaaaacgactaagttcttccagcaaacatcgatcgattgggttgaggccggtttgcaagtttgtcgccagggtttcaacatgctgaacctgctgattcaccgcaagaatttgacatatctccaccttgattacaacttcaatctaaagcctgtcaagacattgacaactaaggagcgtaagaagtctcgcttcggaaatgctttccacttgatgcgtgaaattctccggttgactaagctcatcgtcgatgcccaagtccaatatcgtctgggtaacatagacgccttccagctcgcagatggtattctttatgccttcaaccacgtgggccagcttaccggtatgtatcggtacaagtataagcttatgcaccagattcgttcctgcaaggatctgaagcatttgatttactaccgattcaactccggccccgttggtaagggccctggatgtggtttctgggcgccagcttggcgagtctggcttttcttcatgcgtggcatcattcccctgcttgagcgctggcttggaaatctgctttcccgtcagtttgagggtcgtcacagcaagggtgttgccaagacagttaccaagcagcgtgtggaatctcatttcgatctcgagttgcgtgcctcggtcatggccgatcttatggacatgatgcctgagggtattaagcaaaacaaggtcaacgtggttttgcaacatctatcagaggcctggagatgttggaagagtaacattccttggaaggttcccggcttgcccgcaccaattgagaacatcattcttcgttacgtcaaaagcaaggccgactggtggatctctgtcgctcattacaaccgagagagaattcgccgcggtgccacagttgacaagactgtagcaaagaagaaccttggtcgactcacgcgtctctggctcaagtccgagcaagaacgtcagcacaactatttgaaggacggcccttacgtttcctctgaagaggcggttgcaatctacactaccatggttcattggttggagtctcgcaagttctccccaattcccttccccagtgtttcctacaagcacgacaccaaaattctgattcttgcactcgagcggctgcgcgagtcgtactctgttaaaggaagactgaatcaaacccagcgagaggaattggctcttatcgaacaggcctatgattcccctggcacaaccttggcgagaattaagcgattccttctgacacagagagcgttcaaggaggtcaagattgacatgaacgataactacaacaacatcaatcctgtctacgatattgagcccatcgaaaagatcaccgacgcttatctggatcaatacctttggtaccaagcggagcagcgccatctcttccccgcttggatcaaaccttccgactctgaggttccccctttactcacatataagtggacacaaggcatcaacaatttgtccaatgtctgggagactgccgaaggcgagacgaacgtgatgatcgagactgagctgtctaaggtctatgagaagatcgatatcactctgctgaaccggctgctccgtttgatcatggatcacaatctggctgactacattacctcaaagaacaatgttcaactcagctacaaggatatgaatcacaccaatagctatggactgattcgcggtctacaattctcgggcttcgtgttccagtactacggcttgatgatcgacctgttgctccttggcttgcagcgagccagtgaaatggccggccctcccggaagtcccaacgatttcttgcaatttagagatcgtgccactgagacaaggcaccccatccgcctgtatacccgttacgttgataagatctgggtattcttccgattccaggctgacgactcccgtgacctgatccagcggttcttgaccgagaatcctgatcctaactttgagaacgtcatcggctacaagaataaaaagtgctggcctcgcgattgtcgcatgcgcttgatgcgtcacgatgtcaaccttggtcgtgctgttttctgggacatgaagaaccgcctcccaagatccatcaccaccattgactgggatgatacattcgctagcgtgtacagtaaagacaaccctaacttgctgttctcgatgaatggattcgaagtccgtattctccccaagatgcggaatatgaacgaggagttctcagtcaaggacagtgtctggtccctggttgataactctaccaaggaacggacggcacatgccttcctccaggtcaccgaagaggatgtccaaaagttcaataaccgtatccgacaaattctgatgtcctctggttcgaccacattcaccaagattgccaacaagtggaacactgctctaattgctcttttcacttactatcgcgaggctgctgtctcgactgtcaaccttctcgatactatcgtgaagtgtgaaacgaagattcagactcgagtcaagattggtctgaactctaagatgccgtctcgtttccccccggcggtcttctacacccctaaggagcttggaggtcttggtatgatctcaggatcccatatcctcatcccaaccagtgataagcgctggtctaagcagactgacactggtattactcacttccgagcgggtatgtctcatgacgaggaaacattgattccgaatatcttccgatacatcattccctgggaggccgagtttattgactctcagcgtgtttggatggaatactcgcagaagcgtatggaagcccagcagcagaaccgccgtctcacgttggaagatttagaggacagctgggatcgtggtcttccccgtattaacacgctcttccagaaggatcgaagcactctcagcttcgacaagggattccgactccgcgctgagttcaagcaataccagctgatgaagagcaatccgttctggtggactagccagcgacacgacggtaaactctggaacctcaatgcctaccgcactgatgttatccaagcattgggtggtgtcgaaacaattctcgagcacaccttgttcaaggcgacagctttcccatcctgggaaggtctgttctgggaaaaagcgtgtcttgccaagggaactcgtctcttgcgatacgacgggaccgagatcaatgtcgaggacgtgcgcgaaggtgaccaacttctgggccccgacggagagcctcgccgtgcattcaacatagtgaatggcatcgaccgcctgtaccgcgtcaaaatcggcggtgagaaagaagatctcgtggtgacgccgaatcatattctagtgctccatcgggagggagcctccaatggtcccaaaaagcaaaccgtggagatcactgctgccgagttcgctgcccttcctactgaggaaagaaatatgtacagtgcctttacatctcctagggttgagcagagcgccgaatcttcatctcctcaaattcacagtttcaagatcgagcacattagcctcgaatctgagaagacagagtgggctggtttccgagtcgacaaagatcagctttacctgcgccatgactaccttgtcctgcacaacagtggtttcgaagaaagtatgaaattcaagaagctcaccaacgctcagcggtccggtttgaaccagattcccaaccgtcgattcactctctggtggtcgccgactatcaaccgcgccaacgtctacgtcggtttccaggtgcaacttgatttgactggtatcttcttacacggcaaaattcccaccctgaaaatttcgttgattcagattttccgtgcccatctgtggcagaagattcacgaatcggtggtcatggatttgtgtcaagtcctggatcaggaattggaacagcttggcattgaggccgttcaaaaagagactattcacccacgtaaatcttacaagatgaacagctcttgtgcggatatcttgctcttcgcgaccaacaagtggaatgtcacccgaccttcgcttgtgttcgataccaaggacgtctacgagccgaccacgacaaacaagttctggatcgacgtgcagctcagatatggtgactacgattctcacgacattgaacgttacgtccgtgctaagtacctcgattacaccacggacagcatgagtatctatccttccgccactggattaatgattggtgttgatcttgcatacaacctcttctccgcttacgggcagtacttcccaggcctgaagactctggttcagcaagctatggctaaaattatgaaagctaacccagctttgtatgtcttgcgtgagcgtatccgcaagggtctccagctgtatgcctcggagagcagtcaggagttcctcaattctcagaactactccgagctcttcagtccgcagattcagctctttatcgacgacactaacgtctatcgcgtcacgatccataagacatttgagggtaacttgacgacaaagcccattaacggtgcaatcttcattttcaaccctcgaactggacaattgttcctgaagattatccacaccagtgtctgggcaggccaaaagcgtctgggtcaattggccaagtggaagacagccgaagaagttgcagctctcattcggtctctccccgttgaagagcaaccgaagcagctcattgtcacccgcaagggtcttcttgaccctctcgaggtccatctgctcgatttccccaacatctctattcgtgcctctgagctccagctgcccttccaggccgccatgaaggttgagaaactagccgatatgattctccgtgccactgaacctcagatggtactcttcaacttgtatgatgagtggctcaagtctatctccccgtacactgccttttctcgactcattctcattcttcgggctcttcacgtcaatatcgacaaagccaagatcattcttcggcccgataagaccgttatcactcaagaacatcacatctggccatccctgtctgatgaggactggatcaaggtcgaagtgcaattgcgtgatctgatcttgaatgactatggcaagaagaacaatgtcaacgtgcagagcttgaccagtagcgaagttcgtgatattatcctgggtatggagataagtgcgccttctctgcagcgacagcaggcagcggagatcgagaagcagcaagaagagcagaagcagctcactgctgtgactaccaagacccagaacgctcgtggtgaggacatcatcgtcaccactacatctcagtacgaacagcaatcatttgcatctaagacagagtggcgtactcgtgcaattgcgacctccaatctccggacgaggtccaacaacatctatgtctcctctgatgacatccgggacgatggctacacctacatcatgcccaagaacgtcctcaagcgattcatcaccatcgctgatctccgagtgcaagtcacgggttacatctacggtagctcccccccagacaatgaccaggtcaaggaggtccgcaccattgtcatgattccacaagtgggtaacacccgagacgtccagctgccacaccagttgccgcagcacgactatctccaaaatctagagccgctcggtattatccatacggtttctggcaatgagccgccgtacatgtctgcggcagatgtcacacatcacgcacgtctcatgaacgcccatccttcgtgggataagaggaccgtgaccatgaccgtttcttttactcctggatccgtttcacttgccgcctggggtctcactccggcgggctacaagtggggcgcagagaacaaggacacaacctcggatcagccacaaggcttctccaccaacatgggtgagaagtgtcagctgcttctcagtgacaagatccgcggctatttccttgtgcccgaggataacgtctggaactatagctttatgggcagctcttttggtagcgtggagaagagacctatctacgtcaagattgatacccctcttaagttctacgatgaccaacaccgtcccctgcacttccagaacttcgccgagctcgaggacatctgggttgaccgggctgacaactttgcgtaaacatgcgcagctgatcaggtgcaaaatccttttttctttttctaagcgtcgtcttttttcccctttggttccatttctttttgttcatttgtgttcttgtatcacgacaaccataattcatgtattgcagcgaaaacctaggaaaaaggccagtggatttttttgtacagtacgagttttcttttgcgaatacattttctgttcacttcaacctttatttctttttattccctagtaagtccctcctcctcccctgtaagtatacgaggatgcagttggcttcggaatgcggcactagcttacatcgccactttccctatgaagattgccgcgacgtatgtgatggcctaagcaggcgcccaatagaactatgtagtctgtacaattattgaaatcaatgtgcctaaaccctccgctttgatacatcggacctttctgttgacagatgacagcatgcagctagcacaattcggcagtccttccgaatcacatctccggatctaccagacaaatccaacggggaaagaagggcgcgaaagagagtgtatcagagtctggctgaaaagtcgatgtgaccaatttaacgatcatctcctccaataatctcttttgctgattgtgatattgtctttcttccctttccaacgttatagaactctgctgtcaagtccaaacgccaatattgttttcgggtatctgtttcatccccctgtcctctttgttctgttctattggacatctgtgattgactcccgcaggcctcagctccgaagaaacccggtgcaatagaatagcttgccatcgcttactcgactagcctataccgtatcaatcggccgatgtgatttgtccgcatcttttccaggacggcgtagctacgtggaatatcgatccgacgaataagctgatgtctgatttgctatgtccccgagcgaagtctgacaggcttcacctgtctgccgtgtctttttcttttgtcacggctcttgactcttgaccctagactaccctggtcccatattttgcgttgggttttgatccccattaataggcgctttgccaacaatagttttggggaggttctaccgcgtcgaaggttttttttgaacccctcctcttgatgttgggcgtctgtgcgaaacccaagagagagaaacactaccccatggccggaaagatgggatacaactgcgtatcccgagagaacttgactatggtgatttagagtcctcttgcagtccagtccactggagactgatggaatcagcccggcagcgcacgctccaacttggtcaccggcacacggttggatttcccccagaggactctccaggatgttgttatagataggtccttctcttcgtttttcgttcgctcttaatctaagaaaaaaatatttgttgttttacctaactatacattgtttatgaccgattcttctgcaaaacctgcctacaatttgacccaaagtaatcctatccatcctcttctgcatgtcaacgcgttgaggcctttctcgtctttgttgtggttatatacaggcaagtttctcttggcatcgtcctcctatgcaacagcagaggcttttcttttctttgcctttctagtcgaaagagagactcgggaataaaaacgccctgggatcgttcatctcccaactgctactcaaggcatttgctggggctgcaggtcctggtgttgtttttatgtctacagcaccagcggacccttaccgaggcttcatggttaactacactcctcatgacagtggcaaagatgcgaacggggaggatatcgtttcttacggcgcggcgcagttgctccaagataggcccgatggcattcgctaccactctgatacaacccagacgccctttgggtctccgtcaacttttatcacgaaccactcgcccgcacgccagccggtttcacattacaacacacatgggtatagactctccccaattcagggtagcagaaaacgacaacgtaccgacaatgagcccgaggcaagagaagacagtgatcaaaattatggttaccgacctgtcttgcaaaatctacccatgggtgatccatcggctcctgcaggtgaatcggccgacctgacgtacgctggtcatgccgttccttcatcttcccgccagacatcgaaccaggactacctccagtcctctttcccgcaacagcatcatcaccataggctaccaccccaagcatcggtggctacagcctctgctggccagggctctgaacagccgccactcgaccgcagcttcatgaaccttccaggtttgccggcaccataccctgagccaaaagcgccaaagaccagattcggtcacagggaagatgagatgttgatagccctgaaggagcactggaagttttcctggaggcagattgaatgcttctttccagggcgaaaacagcaaacattgcaagtccgttactgtaccaaattgaaggaaagggctgtggtttgggatgatgctttggtatgtttgcgccccacccaactaaaagaccggaattgcgctaagtcctaggacaggatcggaaactgaaaaaggcgctggaggactatgaggacaacaaatgggcacacatttcccggaagcttggacctggtataccaccagcggcgtgtaagctgagggccgaagagcttgagtgatgttggagtgtatgttttgttagtttagagggacttgtttattatactgtgactcgataatgcgtgttggcgtaagtgattgttttccaatatatcatgccaccccgtgccctacacagagaagccctaggtattccgaaacggatattctgccgctcgtagattgacctcgcaggccgccgtagagagctcctgccaatcagaagggctgactcatcatcagtcgcgctcctattggatgtcccggccagccaatcacaggcggtcggaccaaagcggcttcaaactcgcccaacctcaaacctccaaactccctctcctgccccaaacgccccgcgtcattcacaccattacctccaggacaatgttcctccaacgtacagcctccgccctcgccaggcgctcgcctgcccgcgcttttaccctcgcccagcggcccttctcttcctctgtcattcgctgtacgtgactcctcagatggcctgatccgaccttcgcacaactgctccaatcccgcgcaccccgaccacaaggggcgatgctcagtcaattggtctgaatcttctattatgaccaccagctaacgtgaaactttaatagccagcgacaagaagtgggctcccaagcaggagggcaagatcttgaccttcgatggttagtgctttacccgaccccatgccagtcaattacttttcttccggcctgtgcggctcgacaaggatccatatagtcacgcactcgagaatatgcgtgcaattggacgctatagaacttcgggtgctggtcatgcggatacttttcccgagccacgggccaggcttgtcattctacctcgagtggataactacaaaaaatctccaaaaaccacaatgctgacctatcttctcgatatatagagatcaagaccgaggatgacctctttgccccgggtgccaagcccggtaccattcccaccgatctcgagcaggccaccggtcttgagcgtctggaactcatcggaaagatgcagggaattgacatcttcgacatgcgtccccttgatgcctcccgcaagggtatgactccttaatatctcaagtttccatcgcaattcccgaatgaatgatcaaataccgggggaattgcgtgatcattacttcggggcgaagaccgagacattggctaacaaaatgcgtcgatttattcaggtacaatcgaagaccccatcatcgtcaacagcgccggtgatgagcagtacgccggttgcaccggttaccctgtagactcccaccaggtcaactggctgactgtatgaccgccccatccaagcccaaccgggctaatatctccagctctagatactgactatgcgtcttttaggtctctcgcgatcgtcccatcgagcgctgccgcgagtgcggtaacgtggtcaagatgaactacgtcggacccgaggaggacccccactcccgtatgtttcctgctctcttttttgcttatagtatatgataatctgttggttgtgctaacattatcaccctcagacgaagaccacggtcaccaccaccaccccgctcacgtcgagcccaagaccttcgccgactacgtcaagcctgactactggtaccggtaaatcttcagtgccgattttctttggatgttgcttggaaatcccaatacagtgtgaacattatgctgcgtgtctgtctttgttctgtctccgtgactcctacgtctcttttgtactatagtgctttagtagatggaatgtgagtgttggtgaggtttttacttttgacctatatctatttgggttcgtagttactatgatatgggatatcaccggtcgtgctgttagtaggacttcttcgataccggtgtagatgaaaagagagaaaaaaaatgtatttttgagtctatccatatatcacttttgatccaatgtacatgtatgtatctagaaaaatgcggtggtatatgtgaagcctcaacagggaggtaaatatgcaatgctcgtccactcatatgcttagacatgacatcattcatatatcatcagccaatgttcagcgacccacgaaacgaagttcgatgaatctgagaggagggtaaacaagcgcagtccaacagaacccgacgtaaattcccatctagagagtaattagttaggaacaaatacacacatgatgggagatgggatttaactcacatcagcaccgtattcgccgaccaatttggcaataggtccaatgtaccacagctgcgccatacacaatacggcgcccacccagccaacgataaaggcagtgaaagccgcaatgccaatgggtagctttgacggatcccgccagatgccccagttgtacccagtacggaggcggaagatgaaccgttcctcgaggacaatagcaatccaaatgacaacccagtagcccatcaaagcgaggaaattggtgaagatctcagagaggttgctgcggccaacgagcgcgcagacagtatagataatgacggcaatggtattccagatgacgcgcggtacggcctcggcgtagcgaccgaggatctggaagtcgatgccggcggagtaagtgggcgcgacggtattggcgatcaggcctagggcgcagataactgagcagaatttgccgaagccgtgcagcgggccgaatccttcgacgattagtgctccttggcctttctcataggcggcggaatactctgggaacgtgggtatgcctgaggctaacccgacgccgcagactagggccatcgtgaaggagacaagaaggcctgccaggcatagactgaatatcttcagccgagaggtgttttcggggtagtagacgaagaaatcggctgctagtggggcataggtgattgcggcactcagacagatggagaagaaggatagcctaggaccatgttagaaaaccgggcttcgattcttagttgtaagaagcagactcacctattgccagctactgtccgggaatcgccaatagaggtggttgacaagtcaaacttcacggatgacaccccgaaaaggatgcaaaccacaattacttggggcaaaaatgcgaatctaatgaggcccgtcagtgacattgttcctcatggcaataatctctcaagactaaccgttcatagtagtggaaaacttggatgccgaatgtggcaacagcccagctgataaccgcaatgatcacgatgcctataatatcaagattagtatcactattgatgtatgaagttttcggaatacccaccgacagccacggacatgccaccaggggagacagcagacaatatttgtccgccaacgacgcaatcaatcaagccgtatccaatcatctgaataaggttcaatagaacaatgatcttgctaggccaccagcccatcgaataccttccgaatgcctagtcaccgattagccctctcgatcaaataatagtccaacggattcaatatgtgctacgcaccaatgttcggatcccggaaacgggcccccatgtggccatccaagaggagacgatggaaccaactagagagccaaagacagcacaaagtgccgagtctaggaagttgagaccatagactgcaggccctaacatcccgagggtgatgttattgggtgcaaggttaatggagatccaaagcaagaagacttgcagatacgacatccacgtgttgcgcttcatgcgctcatccacggcaactcgttcgataccacgcgcttctaaattatactcgacgagctggttctcaaaagctctaataatggagcccaatcgtgatccaacgggattgcggcgattggtcgtcgtctcggggtaaagtgcctcatcgttgttgaccacgccgggactttcaggcgcgaatttcgtcaggtcttccttgttggagtgcaccgctaaggtggtgatttcatttcctgaagccatgctgcgattctgttagtatcacacctatttcctgaagagaggaaaagcgcattgagtcctttcgctggaattacccagatcaagtttaaccgtatattctcagaacgacgatagtcgaacaccggtcttcatgcaggatgcttgtcctagataccttgatcgtgagagattgccacactactcgtcttcatgatagccgtcctttgtggcacaggttgtgttaccttccgagagaagaggcactatgaccaacgtcagcggacttgatcaggcaatcacacaggcatatttcacctttgaaagcagaggatattcaaatccaaaacaaagtgagcagcaggtaatagcaggtaatcaattgatatgacaagcacccgatttccagggggggcaaaatggagaaagatttgattgccgcggggaaagaaatgagatagcccgctttggctttttccgccaccaccttacctgacatactacatccatagttattgtactagttacaacacacaagccattgggtttctgatttctgcttctgcaatttcctcggactgggaccagtgggaatcatatggtattgatggacacaaagcgcaaaaaaaaagcagcgctgtcaaaaccaaagcagacaacgcctgggagggggaagggaaacatgacggatcgcaaaacaaaatgcgcaggtgttcatatagcgcatataaaagaaattcgagaataatattgaaaaatattccagatcaccaactccatctgccttgtaaaatcagtggcctccagcggccaccgatgaaacttgcatcgctctggaattgcagggaatccggaggagagaatgccaaattcataaaagatgctaagaaaaacaatatcatcacttcgtcagaggcatcgtggtagtcagacgttcttgaaatgctctttggcatactgttcgcaagcctgtcggagaatatcgagattagatgcgatgcacaatgacatgcaggagattccggtgcttactttggcaggcttgcccactttctggccgatcaccttccacttgttcgcctcgtactccttgatcgcctcccgaagcttcacagactgtgcgacgtcaggaacggatgcgacaacggacattaaaaggactcgggatcatacctcatcttcggcaaattccgcgtagtgcatgtcctgcgcaaggtgtcagtaagacgagacgtggtattacccaaatcgcttaatattgcgtaccttataccaatgcttcttgacactgccctcggttcgggtcgggaaagtctgcgacgggtaagaaaaaaaaggcccaggtcagcaacccatagtttcagcctataaaaagccgcgcgcgcaccttggcaatttcactccaactgcgcccggcgtcgcgcattgtcttcagcctttgctcctcctctgcggtccatggggtattggtgcgtcccttcttcttaggcgtagactcaaccgtgggaatggcaccggagtcatcaatcacaccacccgaagggttcccttggcctgtcatcatggctgacgatcccgtgggagaaggaggacgtttgcgcgaagcgccggggttttgttgggatagagaagcagtcggaatcgggatgccttcaaaggttgggacgcggtggaatggatggatctgttgttgcgaaagcatatgcgggggggcgctggttgttgacgtcttgaggcgtttagatgtcgggggggaactaatcgggcaacaagttaatgaatagtagaaacataagatgaggtaaggcaatataataagaacgcgaccaagtgcacttgagttccaacccagtctccctcctacagctggaggccggacggagatcacagacgaagggacttacgacatggtgaaagacacacgcggttttcaatcaccctgtgccgattcatctgtacatacaaaaaaggccgcgtagagggaggggtggttagcaggatctggtactggcgcgccttggtcaactcggaagcgttacactagagacgatgacacaggcgcatcccaggcagaaccagattgacaaaggtaacagggacaatatgaataagtcgcgacacggataagtccagactccgaccggagtgatttaactcctatgtgggttggcagtcaaagggaagggctcacaggtcaaaatcgcatggtcgaagcgtcgattcggggacctcgaattcttccgaatatggggagaacatgaggctgggtgatggggttgactttgaagggaaggcaaggttaaggataggaaccaggaaaaaaagtagagactttaaaaacaccaggaagggagaacgagatagagtgcaagagagtgcgaaagagagagagacaaggttacagagaagagaaaggaggaagaggagaagttgttgtgaggaaaggcagagcggggatggagtcacctcatatcacaacaaccaaagtaataatagcactgaagatatcattcgagacggttgatacacttgatagagtcgatatggattctatagattatctagctcgtctattttatatggattctcgagtttctattgcttcgaggcgttaaatgcgtcgaatgttttggtttctttcatcttataaccaggccctctaactatttccctactatgtgacccctctattattctctatacctccgtctttcttagaataccccctttatattcatcttttactcccccaatatctaacgtagattattcatgtcaaattaaaattcagtgctgattcaaatgcgcctccaaccactccccctccggtgcattccacaacccgttcttctctggcctaggaaccgatgcgcggacaggggccctgtcgcaatttatgcctcgtcctgtgatccaattcgaccgacatcaagatgcagaagcaaagataactacgtccggcaacttccatgagacatttgggccgaagaaacccgcgagtggcctgttctagaatccggtgacccggcgagatctcacaacaccgtgcgaggatgacaggacacgcccaatgcgagtcaacgatgcgcccgagggcctaattattgcaaaggcatccagtggccccgggaatcatcccgcaatcatcatcgttcaattgacagaagtagaagtctccgtccaacccgagacttggcgggctagatcagccacaggacggtttcgtgtgaagccaccggggcacttcccctctctgccccccgtgccattcgttgatgatagaatatgcggtatggggtagagagtctggaggaccctatcagcatttatcttttgttttagcacggggttcatcaaaggcctgtatatattcaagaagcccagcctcttagaatccagctggcatttcctttttgtcacacacacagttcatccccttgttagtctccaattggtggcaattgacaagattgctagtgttcattcaagccgactaggactacagaatttcctggcattgtttgactcggagatatcaaatggtaatgatcgaatatatccggttaggtttgaagatgatgcatgcaaaggatcaggtgtgcttaatgtttcctggtgcggtatatcaatgcaacaagatactgccaagagtcgctggggttaaatatgacttgcatcaccccgttttaatcaatagaaaaggccgccttatcgaatctaggaatatcaagcccctagatcaacacaacgaaaaaagatacatattctatgcgtttcaacggatggctccaatattcgtgaatataggctaaaacaacaaaggcttctatcaatatgaccaattccttgctcattcacccggccgactgtttcgaccgttctgcgatgatgtaggatccttccggtcaggccaagcctcattcaaaatcagtaatcattacttctgggaatattggcaaggctaatcatgactattgggtaggtattcacgttacagcgattatatctgctttgggaatcccaccgcgtcacctgcatcacctagggcatctaggccttctcgaatccactacggtcataagcgcaaataaatagatcttggtcttgactagaatgtcggattatcggtatcactctagaagcttaagaagaacctcgaatcaaggtttgataactcaaaaatttatctcctaagcttatatatttgctcctaaacatccccgcatctttccttgttccagttcatctcctcagaagtgtttgagaacccctggactatggcttgctaagagcatgatcaatcacagtatgtttggcccttcaattcgattgtcaaattgtttactccgtatgtttcatatactaacttcacatgttgtcagtaccccaaatatgtacatcgagatcgcaatgttgaacagcacatgtcaaccataactggaggctaggcaaccaggtagaaaccccgagaatgccaactcttcctttgtctcataaatcaattcaccatatttctcgccgtctaactagttgaccagctactcgcgatttacgtgctgacgtcaacctcacgtgagaggacacgcggcccgagctcatgtggattgcggataacgaactcccccagtcactctaacagcgccatataccttcactcattgtatcttcctggacgttaatcccattttagggaacgtatatacgcagaaaacaagtactttattgcccaatctactcgagatttcttttttatcccattcctccagatacctggcgccgacctcaatggtgatagcttgacaagtgtccacacctccaactcattgtttgattgtccgatcacaactctccagccatggtgacctggaatgtctttcgtattattgcagatttgtctcatgcaggctcaatatttatcctgctctgggctattcacaggaataagagcgccgagggttcgtatacctttgtataaaccgattacctaggtaccatgcagagcttactgaccaattcgatttaggcatctcactcctcacgcagttgctttacggcctcgtcttcatatttcgctatcttgatctactttttccatccacatacacgggaggcacgtggcacagcatctggaatgtctgcttcaagctcttttacctcatctcgtcctcatacctggtcttcctgatgatgaaggtgtacccacggacaagagaaagggagcgagcttggaagctcgctttgtggtctgtggtagggtcccttgttttggcccctatctccatctggctcttcgacaggtccgacagcaactcttctggttactggtttcttgaggtaagttgaacaagccggaagtgttcatatggtacagcttaactgatccaatcacttagttttgctgggctttctctatcattctggagtctgtgtgtgttttgccgcagctccttctccttcgccagaccactgtcccgacggtgatcgactcgtactacctgcttgctctgggctcctaccgagcattctacatcctaaattggatcgtccgcctttccaataaggagcccttttatgattggatcgcggtcgtatttagcattgtacagactgccttttatgtcgactttgcgtgggtgtactattcgcgccagcgagtcaagcttcgcaatggcggtgtcatcgactccgaggactatgggaacagttggctggtgaatcgtgtactgaatttccgggcctcgcgagcctctacagacgaagaacagcaccttcaagacgaggaggaaggggcggatggtcaatctaaccacaaccggtggggtgctcgtggtatttccatcgcagctgacgacactctggaaagcactagtcacaataaggcacatcgtgacagtttagatgggttttcgggagacgaggacgaaactgatgaccaccgagtgaacagttctcgctgattgatgatattctacggcaaattcggtcacagcatggcatatctacatgtcagtcaggttggtcattagatgttgcgcagggtgggctctaaacgtgttgactgcacaggaagacccgctcctaccgttctagtctggttatatccgggatttcatacccaccgtttgattatcgggcctttttttatggtagaatcaggaaatgagaaaatctacggagcaacggaatgttccgcattctggccccaagtccatggggaccttttttgctcaggctacaccgtttcacgctgctacccggggatcatttgatgtctgatgtgactagtagtccgctatggattgaatctcctttattctccaactacgctgtagtcagtagatatttactgtctcgattcgctccaatacacgggaaccggccgctacaccggtagtcacgtaccggggttaaccctgccgagaatattactgggatatcgtgcgtattccagcacccaaaggagcattgggccgcaacaaagtacatatgcatgcaccctgaaagatagctatcacatacgatgatatcgtaggaacatcaaaagtccccccaaagggcgcaaatgagaatagaccccagagctgacttgggggccaaatgcacttcccttgcaaaacgaaccagaagaaacatcccagtcctccaaagttggtttgtcactgtccaagattggtgggaatccatcaactcccaagatgcaatgtgataagaagatagatccaaaagaaatgagcgtattattcgaggtctagaaacgcctggctttttctcgggcggttagcagcaggacgtggcttggagagctgactccggaatcaaacgatcaccgcagatgtggagattggagattgagaaaaagcaaataaaataaaataaatcaatagcatcataatgaaagttccaggttgtcatgcattctcgcaatgagccgggtgtctgcatgagcgcttaagccgtggtcgtggattccccgtggaccgagtcaccaagcggctcgtggggttccatcagcctcagaaggacttcgggtcatccgtggccagtcgcgaaccgccggtcattgaacaacgcctctgcatgggaaatggagaatgcatggagattttatggagaatgtactttgtaaagggatcgtgatccctccatcttcccaataaccggtgtgttggaatctagtagcgtctagatgaggggggttttttttgcttcttcctttcttcccgtggggcctgccagattaaacaatattagagtagatgacatgacctgtgtcgaacatccttatgaagaggagcagttgcgcattcatgtctaactagaactaattgcaagatccggccatgttacaatacgctatgatatgctatggtatgctacaacatcctacaatatgctacaagataatataacatacaactattatattataatgctgactctatggtcattatagtttttgatgggtccaaaattcatgcactggacctctccagatctctaagcgctacgctttggctccttggaagatcatccacaaccctaagcaacacgtttttttgtttttttttcttgcctgctttttggcttttttgcatcttccttctggcccgttgcagtgggcctgggctcatagagtcaccttaatccctattcgcaatgcagagtctgatccccgggatggatatcagcattgaactaatgagcccgcagcgctaagacataggctctcgtcgagttttcatgagtttcccacgttctaatgcagctcagggctcaccggcggtagcgatctctgttttggtgcgctctgagcctatgattaattccgcgactcattgttcacatcttacctcacgaggcatcccggtgctggctgtgatatctccccaaagtggaggtatgggcggaattgtgcatcttctttgcttttcaatcttcccctcttttcttgctcgcatgaatcttataagatcaactgctttcggtggttgggaagttggattttctcttcatcattcagagcgaaaggcctcgttgatatacaccaacaatcccaaagcttcaaccatagtctgtcagccacctgcagtcccacatattcccctgcctcgagtttcatacttcgtttcacattctgctgcttcggcgtttattctccccactcagacaacgttgtcgaccgtgaatcaccccgtgttttatattccacttttccacctgagtcatgtcgaaccgctcggatatccccttcgttgaacaaatgggagagtactacgaaggaatgccagccgattggcctatgatgccagcggtatgtacctatgcacctctaagacaggacattgtatgcttctgcgacatgagctaaccccgtttacgatctagaccccgtacgtgggatgctacagccctgacttcgccgagcccctagccgaacccggcatgctgatgccactgggtgttctggggagctcgttccaccccggcccagaattcggttaccactctcagggctactacgcagatgcgcaccagcacatcatcaacgaccccctctctgccacagtgggtcttggtatctctgcgcccttcccagataatttcccccggtctttagcccccagtcccgacgtgtacgctccgggcccaagtggtgtccagcatggtgtgacagaggcgcctagccagtcgccacagggctccccacagggctccccagccaagcgtgccagacatcaatcctcggacacgtcctcgagcgagcagccgagcaatgccccaatcaacattgctcctaatccagagggtgttcgccgaatggagcaagaccgccagaatgtccagccctcttcccacgtactccctaagccccgggctccaggccgtggacggcgcgacccccgagcagagtatgaagacgcatttgtcgaagatctgcgagacaaaaagaaggcctggaaggtcgtgcgtctggaattcgaggagaagttccagaaagaagcctccgagtcacgcctgcagatgcgtcttcatcgccgctaccgcgagcgaaaggtgcgctgggcgacttccgatgtgagtgcgtaacccctcgcaacacatggtttaagcaatatgtgtgggctggaatgtacatgtgttggacaacccgtgctgatacgcaagtctactagatcgaacttttgctcgacgcccataggaactgggcaaatgacaaatttcagtatctttcagacaaggtgagatttcccatgtccatgttctatagagagttctaacatgtcttttcttcttctttagatgaaagagcttggtggtactaggtggtattcagctgatcagtgcagaaatcaacttcgacttatagaggcgaaagaacagcatgatcgcgggagtgaatcgccctctgttatgtctgaacctactcctgtgacacccgcacctgtggcacctgcacctactgtgtctcggaaacgacgtcgggcttcagactcttagcttcgagagccgttcgttgttttttatttcatttttcccttatttcatttctttctcttcttcacattctttccagcttgacttttttcttttctctttcagtcgcctctttctttatttccttttcattctaggatcaatctgatcgactcttcaccccgattcttgcccccactgtcgttatgattaagttagccttggatttgataggaccataggatacgcagagctgggagacattggtttctatcacaacattctttatatattttatttttatattttatctcagatctcattatcatcgctatcacgttcttcgtacatttactctcaagttcaacgtaggatgtagctctagtctggccaatttttcgacccgctagcatttataacgccgtagatgaggactacagagatgatactcgtagtcatggaagtttgaattagccatcgaattcccaaagctcctctgatgggtgatatcttagtttgttttacaatttggaatatctcccacgaagaaataatgtgtatgaataagagtggagctgagaaggatagcctgatgaaagttttattgcactgtcaagtactaaacccttactattgggccatgagcgtctaagtgggaaatagttccacttactcttagacagtataatcattaagaagaaccaacagcacaaagacaaagagcatttttagaaggctaagacaatttctaggacaataaggaagcatcccacgtgcaaaatagctaagagtatacaacaatggctctgtcaatactctgattgggaatctctaggcataacaaagcaaacatggtgagacatcagtccaattggttgttatacgctctgttgagacagcgaagccatctgaaaaaaagggatcttaccagagacaaaggctttgtgatcagaatgagatcagaatcggatcttttctctggatagaaggaaaagaaaaaggcaagaaaagtgaatcctacctgaaactagcctgaaaaatgaaaggcaagtcctccaagatctcaaacccagactaaaaactgtttcttcggtgctttgcataagaagacgggatgagaacccatttaaccatcatttccaagaacagcaccatccagcctcatcatggataccccagactttacaatgccggacgacgagcccatcaacgacgatcctagcgagaatggcccgaagcccaagaagactcgccgcagccgctatgacccagagcccgactggtcggccatggtgcgttccaaggtcacgaagtcccaacatcgtgttggtcaggcctgtgatcgttgcaaggtatgtctatctatcatattccgatacctcgtttgctttgactcagagcaccatgctgacgcgtttgaatcgatatgtagctcaagaagatgaagtgcacgcccgatcttagaggctgcggttgttgccttatcctcaacatcccatgcaaagtcactgaccgtgtcaccggtgagacctgggtgcgtggcgaggctgggcggatgtgcgctcttatcgagaacctccggaagcagaatatggatctaaaggagcagatcgcacagcttcagcagaagaattcacagctgcagaactgtctggacggctcctacagagccaatctcatggaccactacgaggtatgtatttattcatatctgctaggatccacatctttgtgagatatccacggtttgatgctaactcagttaccagccaaaccttgatcccagaaatcatcaccacagtctactgtgactgtgatgcccttttttccatgatttatcatacctcgtgggcttagttccgtgtttcctatttgtatcggtcctgctctggccgagatggagtgtataatcgagaagattggggtggcacatggtgacaagatttgtgttttttcggggtacataaatgaaaggagagttctcttacagtagatgagataatcaaatactttcgtctcatttccaaaatgatagtcaatggatatatgtgtagtgtgaccatgtaagcccaaattgtgcactgggtatccataatagaaatgcaatgcaaataaccatcggcctttttatcaactggcattatttttccagcaacaacagatccctttgctttcacaccactccctcacagacgcagtgccaacctcgcgatcctcacccacaagtccaagtccctcgatgttgagccatgctgtaaaatcttccagaacaatagggtcgtacatgagtatcttctcatgccacgtcggtcgattacggctaccacgagatgatgatagcggcgagagccgaggttgaacgcgaacagcttgggtgatctgtgcagatatttctaccaagctgatttctgttgagtctgctgtgtaggtggttgcgatgggtgcagaggatgatggtcttttgactatattggaggaaacgaccttgcgcttggtcgggctcggtggtggtgtttttgtgaagatatccaaggagtggtgttgtacccggctgtcggccttggactttgaatagatatcggtgtagtgcttttgtacttgacttggagagggagtgatttcttcttctgagtcttgaatctcttctacatcaataaatgacgtagaagtcccagtgataggcttccctctcgggtttttctttgggcttgtctgggaataggtttgtaaggcgggtgttgattttatcgcgtcaagtgattttcggttctttataaatgttccagatttagacttcaccgtccccttcgaggtgggtttcggaacactgtccattttagaggcaggttcttgttgttgttcgggttggtaaataggctggctgccaggggtagcattgctaccatgtttcgattcccaacattgttgaaggagatcgatcatcttcttgcggcctctgactgccttgaagccataattagagatctgtttagacaactctgcatccgtgaacccggtatattgtggcatcgagggcgcctgcgagctagttggctgggaaccgacgacttcagtcggagtatcattggctctacttgcaggttttgtagcattcgccttggccttcgccgtagtcgtagccatagctgtagctgtagctgccaggatcggagcctgagcttgaacttgtgtgtcagaatccaagccccttttggtcaagggtggtgatgatggtctcttttctgggggtgaatctatgtctgcaaattcaagctcgaaccagttcctttgaagaggtttgtggcttgcttgttccacaccctcctttgcaggaggttcatccgtcaggtcaaccacgtttagtgtttctggttgaatcaaagatccttcggtgtctctggcgccaacacaccatagattcctggtgcctgccaaccttgatacaaaacgagtagacgactcttggatcacgctggggtccttattgcgcgtcccttctagatatgaaagactttcggatgcatggatggcttgctgagtctcccgcagagtctgcggcgaatcatctctttgcaattgactgcaggtgccaaatacaagatcttgatcattcagaagttcaacggctgcttccggggaaagtaccgtgaacaaagactgtttctctgtctctttggcctttcttcgtctaccttttgtcgttctgatgtccggaaggcaatcgatcaccggctcatcctcttctacatcatttgttgaatattgcgcagtcatgcgcgcagtcaacgtggtgaacttcttaggtttgcccttggttgtctttttgggcttttccaagttctctctttgagcagacgcctgatcagttgaatcagagtaccttccatcgagtgataattggatttcaggattgaccaactctatccgccgacgtttcgttggtcctctgccattgtcgttctgcaaaaggtcgcgggggttcaaagctaacccagagtaattataatcggataccaacttgccaaatacacctgtaaggttcgtaccatgatccttatctgggatttcaccatcgttcacggtgacagtttcctcgtaagcggtctcccttggtggtgtccagtccatccttcttctcattgcctcgtctagatgtaacacctcattctttcctaaaccatttgattccttgggagtagatttgtcgggtacatcttccgaaggagatgactttgtggcaaccgtcttcttcccacctttgctcgatttctttgctggttgatcgccgcttgtctttgtaactttcccagccagagtcatgtttcccgcatctttactcttggcattctttcgaggacgactttttgttggtttcattgtgtcattctttgtgccaacagtctctggctcggggtccccaagcgcaattgttcctggtgcatccgcggttttctgcgccttccgccgcggtttgttcaccgcggttttattgctggtgtctgaagtaggatccttctttgaaaatcgctttttcggcttcgtgacgtccttacaacaagtattgttcgcgattggagtgggaaaaaaccgggaacgcgtatgaggttggaacaaatcggatgtcgagcgtattggtggtggcgttgtacctcgtggcaagacacaaggtgccggcgttgcatcatgcctacctggccttggtgaccgtggtggatttggagaggacgacagaatgatcacgtctgcaatactggccatcgtggcaagtcgcgtctctggtgtttgcttgattgatcagggcgagtcgcgtgcactgcttgggtttgctatatcaggacatatcttaggcaacatttatacctagggaaacagtataaagtgtctgcgagttgggtatgcaggagaagtagcgttcggagatccgagttcaatatttcgatccacaagggtcgatcgcccgcggtcttggcaaagctctatgtacatgctcagtagtttggcccggcaaccaactgcattcaccccagcagagtaaatccagtttagacatatttacgctgaatgcttataggttcaattaattcttgatttgaagacgcctttttactgtcctgtatcacatgaaacaaacgaccagtgtcgaactgccttgcatctcgggaatatatcattcaattcatcattatcttgacttcgtgcaaatccggagtgttctcagctcaatcctggggctgaataatagtagacctctaaaaaccccataggatctgcttgtgattgacgacaggcatattctcaagtcggagccaatttggagctcaatgtatcccaccccgaagaaaaacagcacgacttggagaatgtatgcatttcccactcgtcccacggcaggtttcaggaatttcgagcacagtgaatttggttctttggtatgggcaattgctcacgatcccctcagggcgattgaactcaacaaggaattttcaagtcgttgcttagcctcatcgtttttcttggccgttggcgaaggcagagcccctagcttgtatgctttcttgatcttgttgatatcagacatctcggagagtgtctggtcatcgaaaagcacaggtgttccttgaaccgagctgtccaagtgggccgcaacggattcgtgtgttatctccggagagacagagaccttgaccaccaacatatctttggttgaatcggtgataccaaatctacggaatgattcggagatctaagcccgtgttagctccggctttagtggcaaaatcgtcgctaactcctaaaattggcaacccacattattcgtagggttcaatgagaatacgatctcagaatgcacattgtgagatttcagtcgattgtgcatgtaatcattaactgctctgaatactgcagcaatgacttgagcccttgacagaacctattgttaatgtcagttgcctagttccctttcatggtccttggtgacaactcaacataccatgcttgcatcgataaatgcatactcgaattctgcctgaccgtcgagaagttgacctttcagaaaggcggcattttgaacatcgcgatagagagcaacatgcacgggcatcaatggtagatgtgccacgctgatcgtctctagacttgaggccatgactaaaatcgaactgaaaccgaaattagaaagttgatgacgtatgtgtaatcaagctgatctgattaaacaatcaagtgagccctggagttcactgtctatcccacttcttgatccacgtgactaattctggaattttccggacttaagcggtcgccgacggaacatgagtaatcgcctccatatcatccgcgggcccgacatttagagacctcttcaatcctagctcttgacactccccattgcgaaaatggctttcttcctacggcgcccgttcgctgtatcctcggcacttcgccaggtccctaagctcacaaacaccgcccgattcattcacaattctcccatcaagccaacccaagcagcaaagcctcagggcgtttcctcgatcttcgcccagtctcgccagaacttccaaaatgccttccgtcgtacatacatgcagcagagtgtcaaccctgctcaggatggtaacttgacccagaaactggtatatggcgctgccattattggtggtacaattttggcaaccaacttcatcttcaaccgcgaaacgagagaggatggcggtatgcccgcttacgagcggagcttcctgaatgagacttttgtgcacactggtcttggtatcggtataattggtgttgctgctcgcgccctccacatgagtggctggtcttatcgtcttatggctatgaacccgtggctcgtcatgggcgtgggtctcgttggcagcatcggatccatgtacggcactttctacacttccccggataagtaagtttttcaccttctcttctttgttttcaggagaataatagctaacttttcaattaagctacgttctgaagtatggctgctggactctcttcaacgttacccaggccgctcttctctcccccttgatgttcatgaatcctgccattctcgctcgcgctggtctttacactgttggcatgatgggctcaatcgcttttgtcggtgccactgccaagcaggagaagtacctttacctgggtggtccccttcttgctggtgtggccatcgttgctctctctggtctcgcccccatggtcctccctgctactgccgctcgcactctgatgtggtctgagcgcgtttggctgtacggtggtcttgctgtcttcggtggtttcactctttacgacgtgcagaagattctgcaccatgctcgtcttgccgagcgcggcttgattaagcgtgatgtggtcaatgagtcagtcagcctcgagttggacttcatcaacatctttatccgcatggtccagatcctcggcatgggcaacaaccaccgtcgttaagctccttcatatccactatattaagtgtgcaacctgatatcgggtttgtaacatcagaatcgttgtttcgccttcttttttctcgttcattttacaaccgtgtatttgatgaaccaactgttcatatttttttttttattttttttttggtcttaaactttgatgcttcttcagatgggcaagaccagtcaatcactgtttttacttaccgagaaacatagcagatagggtatgtagtgaatataatctccactcccttgacatttctgctgcatccggaagcatagtgataaccattggagtccgaaaaactccgacttggaagtcgacaaaagcaaagaaatataacacataactagtaatcactactggatagttccaaggttgacatagatatggctaatgctacaatatagttgaatacggtagatttttggtagtgatttaacatgactgccttcgcaacaagaatatactggttacctagcatctcgttgtttgcttaaggtccagatatcatctagatacatgcacatattgcacaatgcaatggactcgaacttatcagaggggcagattgtggtcatgtgattgcaagcttctcttgacggaggttgcccaataagaccgccctccgccctctgcagacttcagatcgcgatacagactcattgaccactacaaacgtgcagattaaacctcccaacataatatcaacacagtcgcactagccttcttgcttccctacctcacaatatgtcgagcgagatggaaattgacactcctgtcgcaaacgacgacgctcccgagcaatcggaccgcagttttgaaccacgcacccaggggaacgcggtcgccgtgcgcagtatcgaaggatggattatcattgtgtctaatatccacgaagaatcgtcggaggaggatgttaccgaactctttgcagagtatggtgaaatcaagaacttcagcctgaaccttgatcggcgaacgggttatgtcaaggtgcgcatcctgaatttcacaactacctctgaaacgacccccaacaacgttccttctgaaacaaggggacccttcttgactcgcgtccaatgaaaggatcactaacaccactattttggtagggctacgcattgatcgaatactccacgctccccgaagccagtgaagctatccagaaccttaacggttacaagctcctcgaacagacgcttcgtgtcgactatgcttttgtccgcccgcccccatcaggcaagaacaagaatggagggccaaaaggccgtgctattcggaatcgcagcagaagccccaaccggagtcgcagccccgaagctggcggcgaccgggaataagccttcctgatggatgggaacgataaaaattgacctgcatacattgcttgtgatcttctattgatacctgggctttgttttttctcgcatttttctctatacctcgcgctgtttcgttcgaacctttgcccacccttcctaccagaattgtctacaaatgatggacatatcatctagtattcgccggcatggccactcctcagtcgaacctgtatgggtccgcaggtcgagtgtgggtgtgcatgggacacatacacacaattggtacgtgccggcgccacgatagattgccataatggtatggaaacccgtccttaacctttaacttcaatcatgctgacttctactcagaaatgaaaggccgtttgatgaaaattgaaaattgatgtatgagcatctggtcaacaaagacaaccttggacctcgaagacctgcctctgggagtaatgtacattatgaagaatggttcttcttaattataagcgaccttcatcatacgcacttgtcttgtgacctatttgaagacaaaatcaaaaatgttagtagagtattagtatacgatgtattagcaggatcccttatggggtggaatgcatcatgcgatagccatgtggcgcaagagtagaatcgataaattattttggattctcgagtgagttagtacatatcgtagagtcagatggtttgaatgcttttaaggctttgatgccatacaatggatgtggatgttcacctgccccggtgcccgggtgggcagcgggtcttgtgactaagcctaacccttcccggcttccccgcatggcgcatgaggttatctctgtccctcttttttagtcgatctcattgtgccctctctactccctattcttatagacggactccagcatcctgtgtctgggagtcctactctgacaggatatatttcctagggcagaatggctccccaatacatatcttttacccccttggggctatcacgacctctatactgtattcttatgctatgcttcctatcgttttcagctgcggccaatgcgctggcgtatccatctcaggaacttttgggagtgccttcagtttccagtcccgttgatgatttcccaaaagtctttagggatactgaatcggcgcgggaagcgtcggttcgcgaccccattctgaataccttacaggatcttatcgccgccctgcaggtgatgcaagacaagtattttgtgctctggcagggcacgtggcccaccagtatcgattggaccgcggcggtactgggtgcacacgtttcggcagcgctctcgactctaacctcaggcccgctcgatatccccgacacggatgaattgcaaggattatccttcttcaggctcgagcacacggtcaaccgattcttcagccatactgccgcgttctactttggcgagaactctttcagtcttagaaaccaggcctacgatgacatgctatgggtcgtgctagggtggttggaaaatatcaagttgcaaaatcttcactcggaccttcactatgtctcctccaacgacagttctggagaactgtggtacggtactcagttccagaactctgctgcacacagagcacgcgtcttttacgagctcgcctctgctggttgggacaagaccctctgcgagggcggcatgatctggagcccatatttgacgccatacaagaatgcgattacaaacgagctctatatagccgcaagcatcgagatgtatttgtacttccccggtgattccattgacgcccctttccttgtcgactcgggcacgcagcgcgcacggaagaacccatacaactctcttcatctgcaggctgcggttgacggatatgagtggctcaagaagtcaaatatgactgggatcggcggcctctatggagatggtttccacatccgtggctggcaaagcgcatcaaatcccggctcgggacaatgcgatgagcttaactctatggtctacacctacaatcaaggagtcattctcagcgggctgagaggactttggctagccacaaactcgcaagtttatctgcgtgacggtcacgagcttgttcgcaaagtactgcaggctaccgggtggccacatacctctagccagcagtggaaggggcttggtcgcggaggtgtgctcgaggacgcatgtgattctcatggaacctgctcccaggatggacagaccttcaaaggcatatttttccactaccttgcaggattctgtcgacctcttcagccgcaagagaagcagttcctggcggacaggacccgcagaaatgcagcagatgacgactgggccgaagtctatgagcagcatgtaaagcagtgccgcacctatggttcttggattaaacacaatgcgcaggctgctctggtgactcgtgacaaagccggcaagtttggtacctggtggggccgctcgtatcatcagctggatgccaacgagatcgtggatagcagcactatcccgaatggtgctgtagattaccgcaatgccgatcatgaatcaactacaggcttcacaccgaaggactacaacgatcgtggccgaggccgcacagtggaaacacagtccggcggcgtcgctgtgttgagagccctgtaccagtggcaatcctatgacgtcctatgaacaaaacaaatgaacggtttgggtttggggttggtgttttggcggtaaataggcaccattcattgcatccagggctttgaagctctttttttgtacatcctgcacagctacagttactggggatcattatcatatcgtccaggttcgacattggcttctcagtagttacgattttttcaaactggaactgctttcgcatcttgacaacttcccctgacccttggacctgccgatcaaagcagtagtactacaacgctagtcttttaatccgatcctctatggatctcgcatcgtgcacttatcaatttagcaacacaacgattggtggcaatggatccccagcttccccattccgatgatcctctccgcagagcacggcacataaaacaggaattcaaaaaccaaaaccggattacatagttgatcgtcggatctgcaacaagtggacactggtgtgagggattacctatgttgggttttgcgagagacataggacattttgcggccgacttacaatataagacatgtttctggcgatagctacacaacgttgaggactccagtttgggtctgcttatgcgatacatgttgagcaactgacaataatatctctgtgttcccggagtgaaacctatgcaatgaatgagagatctttcatgttgtcttgccgcggatatgatgttcgatattgacccccagagacgatgtgagacacagttcggcacatttctaggtaagttgatttcctcggctattatatggagatcaaactctattatactatctacttcgggccgttggagagagaacaggtggatgacattggatgacatgttggatgttgaatgcatagaatgaccggagggggcctctacactgtagataaggtgtattccttcggattgtcatccttcagaccaagccttatgaacagaagtatgaaagcgacataccttgtcaccactaaaatgccaaaaccttgaattctcgtcgcgatgattgggccttcaataatacccagcatcgaagaaaggcgggaaggtggccacttagaacacagagaggggcaaaaagaagcaaaaagaagggaagaaaaacccaaacatccactctagcgtgcggactaaacatccttgacgccccctccgtaatgagggacaaaaaaacgcgtccgtatagggtgggggtttcgggagtccgtagggcacgaatcaacgcgacgaaacatacctgcagatcggcggggactttgtttgaccattattcggagtagctctctttgggacgccaaaaataaataaaaaagcaatttcagggttcgcatgatattacgcggatgtctcatgaacaacgggtggaatggtaatagctgtagaaatgtggtctgatatcgattttgtctcagtttgccccgatggccacgtttttctttcttgcttagcgggaaccatagttcaattaatctactgtagaaatgatataccctaaatactttatgttgcaaaccttggaattaccctaataccaatcttaaacatggttcttatcgacttgttagattacggcccaaagcatgtcacacgcacccccccacctcatggggttcggcgaagagggtgtacaagtacggagtacggagcactccgtacacctttggcagttacacctgtgctcatggggaaggtactagatacggtaggtctgagcgtatagttcagcgctgttcctctgaggtcatctgacaacgggacctaggaacgcattttggtttgacagagggggtgagttggctgtcataacctcataagcaagcccagcggggcaagaatagattagttatgtaggatgtaggatgtagaatgtatactcgaatattgatatattatatttctttggatcaatcgcattctgagtttatagtctgacggctctaactcggcaggcacgatgaaacccgatgttgacaaaggcggaaagactagtacatatccccggaccttgaaggtggcaccggcaatttggatgagggtctaccatatcttgccgaaaccggggagcatagcagagagagtcattgaaaacgatttgctgagatcggcatctatgatggcactcggtttcacctcctttttggctcggtgtcgaataataaggaagcatgtcaaatccagtgtcgaaggtcataatgaatgatcgtctggattccaagcgttgggcgcacattggttgcgatggagtgggttaaggacgggaggtggtgactggtcgcgggatattacgacaggccctgcggagcaagaaaatgcagttgtgccactgaactttcctggctaagttagtcagttaatcttccgcattattctccagtgctgtggtcagtttttctctctcggtttttttttttttttgtggcggtggaggcggctaacgaggggcgaacggggatttatcgtcggatatgttttttgtgccttccattacagtgcaacatacgttctatattggcagatggacaatatgaaccaaagaaggaccttcgggatctgtacggggggttactggcactctcctttgtccctcggccgatcttggccaagggcgggtatctaccccttggaatcttcgtcaccgtatgttgtacgttgtagaatcatgaccagtatacaacatatccaacctccaacctcgccgaggtaggtagtagaattggtgtactttggtatcaccacgatgtatacggagtaagtatccgcgatcagaaatacgttcctaaggggccaatgatatccatggcgtcatttggctctgaggctcgatcgacattgcatgcccccccccctctgaaggacaggggtatggccacatgtgcaatactgcataatacgtgattaatacgcgattcataccgatataagatcggttttcttttctttttttcttttctgctttattattccccatacccgtagacggcatatccgggtgagaataatgcaggaagacccaagttcccggagagtgactataaaatataaaagaatgcagactccgtggatcgatatacaatatacacagttaatctttttttttttccacaatacgtgtcaaatcaatgctacagtggagaggaaagcgtgtgccctatgatgtaccgagtacctgatcggaccatgcctcgaatagggaacggcggtgtaccgggtacttgtcgggaaggtggtgtgtggaaaggggaatctgaggagccacccgttagttcctgaacgcctctcgtttctagaaatcccctctttttttcctttttctgaatcttcaccggttgattttgattttattgggtttatttgattgatcgaggggggcatttcgatgtctatgggctggctgggttattttaatattgtgccacgcgatgtcgacgggaattgcccttatagtatgggtattaattcatctataaaaaaaaaaagggaataataccgacatctagaagaaaataagaaaccagagggagcatccaagggacatgggttcctgttaagataggcaattataccggaagactccataggtaccccttggtaccgcacccgtcgtaccacaacgtaggtcactctgaggtacccctccgctgtaacgccgataccgaaactctcttccttttcccccaaagctcttttcggttctctgactcctctctctctttcttcaaactatcttctgtctcttctcttggaaagtcctcctcttgccatatctatagccccgatccctcccttgtggccaacctctcttcccggaacgagcgtggaaaaaaaatattccctggaccttccctttgaaacttacaccactccggtttacctttctctcccctctttcccaatctcgaattggattcagcacacacgcatttcggaattactcgtctagtcaagagtcggccacggtcgtcttgcgaattgcacactcctccatctcctttcgacttcccaccgacccggtagctacctcaagcgtaacacagatttcttgtctggggtacatcgctaggggtagaccgtggtcgttcatcagccgttactttccctccggtctttttttttcagtgtgcatccccaatcgtgggagcctgatcagaccgccatcctggacctcatttcgatattgtgtgtcgcgaagcagtaacctttatggcatcagataccgaaatgacagaagcctttcccgttgatactctgccgcaccccaacgacggtggccacatgcacatgtcgtcaatgtcatcatcgtcttcgatatccgacgcagaacacgagcgccgaggccgatcagaacgtccgcgaatggcgagccgcaaacccagtgcttcaatccttgtcccgagagaccaccccgaaattgaaatcgaggaggaagagtttcctcccgacgatgcccgcgcaatgagtccacgacgcaattctgccgacctagagcgtttaggcaaggaggcccgacagaccctacaagagtgagttgaaaaaacacatccaaggcgtttttgctactgaattacatcagatccaagattccggcagctaaccagatgaactcggaaaaatacagacaggccaaggctctccaatcgtcccttcaagctctcgccgaacgcatcgacgcggtcaaatcggaccatgacaagttggaaaacgagaacaaaatcttacaagactacattgggggtctcactcgcaacatgaccaagagcgaaatgacccgcagtacgaaagcacgcaaagcacaaaaataaaccgcctttccgagatggcgcaaggtagcccggatacaacatcccgtggacgtcaatcgggaggaatcgcctgtgactctgcagcagggggttccatgcattacaaacggtcgcgggttttaccgggattcgaattattttcacttcattacgacgaaatccatggtcaacggatttctcttctcaccgcacatccaactggtcgcttaatgagttacatgcctaatatccgcatggcaggtctcataaaacagcagggttagggaatgtctgtttacaaccgtttctccttccgcaatggggtgcgtttacccgggggcaatctctcggttaccattttctcacacatcatatctgccacccgactggttcgagtggccaccctgaaaactcaccacctttcagtttaaacgccaccaagtcaccatctccacatttcccctgtccaaccggggtcagctgctaaaccgggggtgaggctgaatcccgaattcttttactcaagggacttcaagggattgcttgtgacatcattgcatgctcacctgacttcttggcacttgctttcccgagttcttcattacatcatcctcaaagtcggtgtgcaaccttccatcctatcatcttcacgcagtgttccaccctgcctctattcaaccctgtcgatattattggccctttttatttcctattccgcactcttcattcggcgttttcttcttatctttatggcggctcagtgaacacgtttcacttgtactttttcttcctttttgttgtctatgcatagcaccttgggcgtttcggggactgggactagactcgatttgattgaatggctcctgctggagcattgaactgtttcttcgtcatgggcattgcatggtggcggtcatcgccacaacagaacggcgtgggaagtggaaagcatctttaggggtctttggggcagtccatttatcttctcgcatgccttctcgatattcgaggggctctctgtacatctgcatctcaacctgtttttcttttttttctcttctttactgtctctgctggactgactcgtgtctctgcatgcggagacaaagatgccgctgtttctcattgttatcattgtggctctatttctacttcttacacttgacatacccaggagcgtgcatgtctcaagtcctctatttccctttattgccctcatacccctttttatcgagcccacatggctggtagcattgtggtttcgaccatactaattgaaaacatttcaattaagactgtcttttgtagatctctatagatccaataaaaccccaaatgtggcttgctacactatgacacaggtaacccgatgcggccaagagcgacactcggcgaaacgccatccaatcgactaacgggtcattacgagcggacaaataaccggaccgtatgtcctgcataccccgtgaagaaattacgccgatcaatccgcgatgtgacaccggcaggcgcacataagctcggtagtgtccaattaatacagccactgatatcattgccgccctcgtctgcagtatacgggcatatatgcgcatatccgcgcatcctagtcggatatacagtaggaatacggtgtaccgattcattatttgaaacaatgctttgtattagttaaggatctggtacgtaactaattagttatatattttggatgacctatccaactggttctatagggtgttctgattagaggccgtgctgcctatgggtagtaacgaagatactgtgaataatggagtgtcaatttagaggcaggatgaggctgttatgataaattcttccatctgcaccgcctagtttactcggacaagacagcttgttggctactctgcgacatccggggcaatggacatagactcatacacatacacagtcatccatgcttcagctacaatgattcgcaaggtagttactggaacagtgtacggagattatcttcgaaaccacatctagtgagaatcaaaacgccaaaatggcacatatacggggagtgatcaataggaaaggtgaaaagccaggttagggatcagcagggatacccttgttgaagtcctgataaggaactgatttggaaaacttctgtgtgtatgtgtgttgggctgggggagtgcgcgcaaggggactctttgggtagttaagaggcaaagtaggcaaaataacaaggagaatgaaaaaaacgaaaagaggagacaggatggatatcccccagggcagagaacaagcgccgggccaaagcaaaggcaagtaggcaagcagacaagcagagaagcttcaaggaaaaaatgacccagagagcagggtcacccaaagatcgcaatattctcacaccaacccttgcgagtccctgcgacaataaaccgacaatcggggcaacacatctcatcatccttcctccttcatctcgaatctatctccttgtactagaagacccgtcgcgcgctctctttctctcggttgttccatccgtcctgaggacgcgtgcccatcaacaaggtctttttaggtgttaatcatttactcggcggcgggcttctcggcctcagcggccggggcctcctccttcttctcagcaggggcagcgctctcggaaacgggctcagcctcggacgaggtccagagagtctggtgagaaacgtgggtcagtgtatgaacaaatttgaatcagtgtgtgatttgaacacttacgaggttgtcacggagaagctgcatgatgagagtagagtccttgtagctctcctcgctcagggtgtcgagctctgcagacaaacattagctttggtcaatgcacgtgacggaatttgaacataccagcaatggcatcatcaaatgcaagcttggcgaggtggcaagcctggtcgggggagttcaggatttcgtagtagaagacagagaagttgagagcaagtccgagacggatggggtgggtaggagcaaggtcagtcgaggcgatctcggtggcagccttgtaggcctccagagagtgatcagcagcacccttgcggcggtcgccaatggcgaactcggcaaggtagcggtggtagtcacccttcatcttgtggtagaagaccttggactcgccgctctgggcggacttgatgaggtggtcgtccagaacctcgaggatatcgtcgcagatcttggcaagctcggcctcgatcttttgacggtactccttgatgagagtgacctgggactcgttgcccttagactcctccttctgctcaatagaggtgacgattctccacgaggcacggcgggcaccaatgacgttcttataggcaacagacaggagattgcgctcctcaacggtgagctcaacgtcggccgaggcgacgaccttcatgttctcgaccatctctgcgtcgcattgtcaggagtctgtgcaactgaacgatctagatttaagagaaaccaaccttcatagcgctcggcctgctcagcgagcttggcgaggtaaacagcgtcttcgtgacccatggtgaatgtgtgttttctacagtccgaactatgttagccaatctttttcttctcacatgagtctttattcttggattgatgatgttcgatgcgagggctgaaaatcacgccatgggacagtgcaagtggcgatggcgaggggtagatatcgaccctcgaccccccttcgaatatacggggaagggcccagttgaattttgatgagtatcacatagaacgtctctggatcaagatattggaacgaaaaactaaaagaccccagagatttggccgatcatgacgatcgtggcggttacagggcccttcttcccgtgtgtcgttggggagtatcgcaggaaagcggtcgcggcaacgggtcaactcgtgaacagggagacgagaacatgtggtttccaccgtagattgtagcgcgattccatgatttgaatttgggcagaattgtagttttcagattggtctcttcccatcatggattgttgatgtgtgggttttgcggtgatgacggggggtgggcatagaaatagggcgagaaaaggacagattcaactgggggaacgacaggaagacactgacctggtttgtgaaagaggaaatgaaggcgattaagggatagcaagatggaagatggaagagagtagggagttgaaagagaggaggtaggaggaaaggaggggggcagaaggcggtgttgttgggatttacctgaacaacccacttctgttcgggctttgtggttttttttcttaggaaatatcgaaaatgacaagtcgaggtcacttggacctgttctttttcttctaattattttattttctatatatatacaaaaaaatccaggaagatatggcttttttgccaatctatacacagcacaccttctctcatcgcttctgtgtggttcggtgggccgcctacagcgtcatccctcattcggcatccgccaatcgcccggttccttacttgcgcctcattcgagatcataaaccaaggcagacagcatgtgtcggaagcagtctagaacgaatggatatacagcataaaggcttggctattggcctaccgggatcgcaaaagaacgcaaaagaaggggggaaaagagtcagctgcagtagattaatgatgtgatcatccctgcaacccctgtgatccgaagtagttgaagtacaatcgtatacaactcgcaagggcccaagtggaaaatcgaatgagaaggccgcgacttatcagaaatttttgttcacatgaccttcacctgacataagcttgtttcttccgaatccccatcacatgatttggcttggcacgggacgttaccttcctcgtacccgagctcacctcgtaaatcctacctgaaccacttctaccatctaaatcatcaacatgcttcgtcaatttgttcgtcccgctgctactgccaaccgggcagttttcgcccgctccttctcggtagccgtccctcgcatgggcgaaggtgacaccggtgctccccgcactagcggtggtacctcctccgggtaagtgcgatgcacgttgactgcggattttacgctcgaagtacaattgtaccgagtagacagcccatgtctgccttgccgcagctgggtgacatatctgtatgatcgctaacgttgggtcctactagtgactcgttcaccaagcgcgaggctgcccaggagagcctttacatccgtgagaaggagcttgagaagtaagttccgcgcaaagccgagaacaatcagacaatcagactcgagcggggagctaatctattttgacaggcttgctcagctcaagaagaagatcggcgagcagcgcaagcacttggatgagctcgagagccacatgtaagtccaagtctggaaatactctcctgcctatttccttttcagttgaaagtaaacggcaaggctaactagtttctctttagcgatggcttgagccgctaaatccatacacccattcatctcatgtttaatatgaagggcccttccattgctgtgtataataccatcttcgctccaacgagctatcgtgcttgcctgctgcattgaggtcgtatcgttttcagcgcctgttcctaaacaggacatctctctaccatagcatatggaatttctgcgctctggtgtatagctcagtagctcactcggaaatattattgagaaacctcggtaaaataaaccatgtttcaatctgtacggagagtagtcttaataaactacctatgtactccatatgttcttggtctttgtacaagtacacgagattcctcatcttttcgcaatgtttatgctttcttttggcctcaactaacccgagaacattgtcttgcagcaaatgtttacccaaccaggtttaccagcattgtacaaggattatacgagttatatgactaagttgtatcttgccagccgtctccacaaaacaaagcatgatcacccagcttaggctgaggctccttccatcttacctcgacccaacgcccaaccccccagaaataccccgccatgtctctcctcagtttgccaaacgaaattttgctagccatagcagagaaccaagactgcgaaaaagacataaatgcgtttgcaagaaccagtggccgttgctatatcctcctgaaccccttcctctatgcctacaacgtccgagagcaccagggaagcgccctccattgggcagcaacccaaggaattgtgagggcggcccaagaatcactccagcaaggagcagaaattgaatcgagggactgggaaacacaaaacccgccgttgatactggccgcttactacggccatgctgatatggttaccttcctgttggcacagggcgccgacccgtacgccgaaagcggcgggaggacccaagacgcgatcacatcagctgtgctccgcaataaaacagccgtcgctgaaatcttgcttgatagcgggattgatgcaaataggacggactacaggggcagcagcctattgcatcttgcggctgaatcatctcccctcagcctcaaggcagtggtgagaattcttattgagagaggtgccaatctggaatctaggaatgaactgagtcagactccgttacaggtagcgtgtaagtctggttccgtggaagtggcccgatgtctcatagagagcggtgccaatttgaatgtgcggagtgaaagtggaagttcgctcctgcacctggcgttcagtgaagtcaagaccgttgagttgttggtgcagaaaggagctgatatcgaggcgaaagatgagcaaggtgagacaccactgcatctggcatgtcgggatggctgggtcgaaacagcatcattcttgctggaccatggtgcagatatagagtcaagatcgctagatgggagcacaccattgatgcggggagtactctgggagagtattatatgcagggagctgggcccaacctctgtgaccaccctcttgctgtcacgaggtgccaatccaaggcagggaaatgatttcgatatcacaccattgcattgtgcgacggccaaagcaaattctgcgcttttcaggctattgctacgatatggtgccgatgtagagccaaaaactagggctggcgtgacgccgctacacaaattagcgtccactggctcactggactccgcaaggcaattgttgcagagaggcgctgatgcacaaccgagggacgaagaaggcaatacaccattgcacatggcagcggagagaaatgatgtggaattcatcagtttgctgctagcggcaggcgctgaccggctggtcagaaacaacaagggtcaatttcctatacatgtagtatcaaaagcagcacacaaatcagaagaaagacagagagaagtgatggctctcctcgaggtttggtctgataattagcattagccatagtgaccaaagacataatatacaacaaatatctgagaagagtttgtcaatcctattgcattagattctacaaaggttcgaaatttgttaatcacaaagcacatgcaagcattttattgtgacggactattagcattcccagactacaacagaaagcacatcgaggtgccacgtagccaataactccgagttcaaatcattaaaaaaagccatccagccctttaccgtccttgcatgaaggagcggtagaaatcatcagcagtgttgttgttgcccatgccattgttgggataaccgtatccgagacgggcagagattgattggcctgccttttgggcggcggtgaccttggactgcagatccgaggtgccttggtcgatgagctgcagctgggacaggtgcgcgttgagaatacggacaatctgcgaaatctatagagatgcgtaagcaaaagaataaccctaaagaagggatcaatactggtttgtgacttaccggctcatctgcgttgttggtcttggtcaatgtggatgaagcaccgttgacctcttcaatcatgctggtaagatccttgcccatttcgtccaagcgttccgagagcttttcggccagtttgtagctaatggctagattagcaaaccatatcaaatgttgcgttgtgtgttgtacttacgttgtctcacgctcctggtcaggtccttgaagggactctccagggcccacctgcttggtaaccatctcgtcgacttcacgctcatatcgatctagccatgagctgagctcatcctgttgaccttcaaccgctgacaattggcgctcaacctcctgggtagctcgatccgcatcaacagtgctgccgtacagcttctgaaccttggtaccattgtccaccagcagacggtcccactcggaaaccttctccgcctgttcgcggaagtccttttgatatttgccgagatccgtggcccatcgggtgatgatctcatccatagttttgttcttcaggcgtgactgggctggaggagcggggccggcagtagactggccaagggcggcgggcccagctgcagcagctggagcagcggatgtagtcgaagcagccgtcgtttggggtgctgaactggcggaggtcgctggttgcgccgaagtggtagtagcagcttgactgaacaagccgcccgtaggtgcagcaggtgtagtagtggcaggcgcggtagtggccgcagtacctgaagtagttgtgggagctgaggtgttgaacaggcctccaagaggagctgttgctggagtagtcgacggagcagccgtggatgtagcacttccggcggaagggaaaaaaggcttttgaggggtagcactcgaggtagtgggggctcctagggagagagttgtgtttgcggtggaggcaggaggagtgcctgccaggttcttgaacatagacggtgtctgtgagctttgcgcaccacccgcgggtgcagctgcgccgaagagcttaggagtgctatctgcagtactcgtgggagtggctgaatcggccggcttgcttccactgaatagaccactgctgggcgcagtagcggttgcgccaccaaaaatcggcttggttgctccccctccaaacatattgttagatgcctgtgaagtagcaggcgtggtagatgacggcgctagggtgggggtagtcgagactccgaataagctactgggtgggttagatgccggcggaggaccagcaggggtggtggagttgttgccaaacaaattgcctcccgcgggagcgggggtagctgttgtagcggcgttgccaaacatattctttgcacctgctccaccaaacatcgtactaccggcaggtgcggccgattctgtagacttgttgggagtctggttgccagcagtggcgccaaagaggttaggctgcgtgccagttcccgatggagccttgctaccgaagttgaaggccgaggtaccgcccttggtcgcattggcagcgcctgcgtttccgaaggttggtgtgttttggccacttgcggaatttcctccaaacatcgatgtgctgttgccggtggacgaagctccaacattaccgaagagcccaccaccagacgcattgttatccttgttggcaccgaaggcattgcctgctgtgccgaaaagagatccactagaggcgccagtagaggccggggagtcgaaagagaacaccatggtgctggtgaccgagcttcaggattgggagggaaaaagctggatggagagaaagcaccagcgacacggagcaggaaaggtgggcctgcagaatggatcaaaagacccaacagtaggagaatggagctcttgatcgaatgaagtgagacaaagagcccaagggtggaatgagaaaagaaagtcgaagacaatagacaatagacaataataattggaaggagtttggcaagcacgcgctgaaaacttggcgccttgaatacaaggcagtaattatgcctgaataaagtggctaacatattgataattagtgcctaaggcatacatgttctggactcacatcgatcgcagggaaacaagtcctcactgcgcactacacacgaccccattgcattttgaattattcatttatacgtgccccttctttcatgttaacaccctgaattcaagctgcaatcatgtcggaggggccgtccgatttgtctagttcgcatctagagccacccagcagaactacggaaatgcaagatccaggagctggcgaccacagtacttaacccttccatatacttgaatatttgtttgaaactgacatttgttatagtagcttctgaaagtgaagatgaacacttctcagatgccagcgaaggcaatcccgaactcctcccacaatctggtcgcaattcccctatcccacgaacgcgagtcgagagggttgacagcagcacccaacatggagagattcctggcacagcagcattcgaaaagagagagcaggatgcagttcctgatgaggttgaggttatcccagaaggctcggacagccagatgccttcgcctgcagacgaccaaagcttgagcccagaaggcttaccgtttccacgcacagtggttgagaaggtggacccagatgaacctagccatggcgaagtccccggaacattggcccatgaacaacgtcttgccgatgctgtgcccgacgtggtgaccaaggcttcagattccgagagcagcccaacgccaccagcatccgaccctacacttcctgagaccgatggatcttcaatagaaattcccgagacacggctcgagcgggtggacacagctcccgctgacgaagacctgccgccacacccacaagctcataaaagctcagcaagtgacgcattacccgatacggtagaaaccgtcccggatgtctcaatacatgatacagacctggaaaccaaagacccctcattagaggatgacatgaacgatgaccacggatatgaaaagcaagaagcgggtgatgattttgatgaatttgtagaagagcaggaagacatgggagatgatgattttggggattttgacgacggcttccaggagcccagtgcagaggaagcccccatagacgataccgtggcatctcagcaatctcgcgcacccccacctcttatcgacttcgacacatacacatccacctccgcactcctcgattccctcaaagacaccctcgacattctcttccccgaaacccaagacataagctctctcccccctgtcgagccaatccccgactccgcagcaatcttcagcaccgagcgatccctctcactgtggtcccagctcgtggcaccaccacccctccagcctcagaactgggtaaaatcccgcattcgccgactattcctcgtatccttgggcgtgcccgttgatctggatgagattctcccagcctccaaacagaaaaagctcgttcttccttctattgaccttgaaggcaccggcgcaaagagccccggcgctcgttccgctagtcaagtccgcaaagaagaaggtaacgacaacaccggcgaaaaggggcaagccccctcccgccagaaggctacttctcgccgcggcgcaccaccggcaccggagatagacctctcggcggtccgccggctgtgcgccactaccgatgctgcactgagtggtctcacagattcagagttgaggctgcatgtccatgaactggagcatgttgctcagcgcgctagttcggtattggagtactggctgaagcggcgggatggcttggtcggcgaaaaagaggctttcgaaggagtcattgagaacctcgttagtcatgttaggagggtcagaaagtagtctttccttactcgggcacttggtgtactatctgaatgcccaatataatatattttatataatctaatgtcgataccagagaaaatccacttatacctgcgaacttccctgcgtagactgcagcgtacgagaggacgtgtcccaagggattttaccccgtaaaagaggggtccacccccatcaaaagctccgacctggctccactgtattgttccaaggttgatcttgcgacctaggtatgtccttgatggctatcattgttcacgatgcccttgttctgcgagatacttaatccctccccctctcgttcctctctcaaaaagaatgcactgaagtatgatgacgcaataatggggggttggttatgcacctctttcagtagtctttttagccgtcttttggcggttttttgtgtatggatgtcttcttcccctcctaacttacctttctatgtatctgggtttctgccttgttcgtacactcccaagccagctcacatcctgccttcctagccgagcacaatacaacccaaaggcaagtatctttgtactcatctcatcaggatgtcaaacagtggtgtcactgccgctctatcttttccgtccgctctacctgataaccacatggttcgggtgtttacctctatgaaccgtctccgtaccgctgcaaatgaggtcttcgcatctcttgacaacaaacaaagcacaaaccaatggcttcttgttcttggcctccccacaacagtcatcaagcgcctcgacgaagaccgtaattgcctagaggcgattaattaccggttccaatggcaaggcaggagcggtctgataaaagtcatcccgacagcccaacacgaaaccatcaccacgagggttatgttctctgtgaatgacgctctcgctgcaatgggtctacactggagtgattcagaatgggtcggccatactacctacaagccaaatcttgccaaaggcaaacagcccgacaatgcatttctcccgccctcccgctgcacgataccactcagttcgacgggatggccaactcttgtcattgaattgagaccggagtgtctgaaagcttgagccagctccgcgcagacgcagcaaagtggtttgcagattcgaacggcgatgttagaatcgcgctggttatcgccatcaaggacagcagggttgacattgaaaaatggcaattggctccagaaggtgcgtccccgctggatctccaggtccccgacagccaacaaccatattgcgcccaggagataaccatcacaccacaaggtgttactgggactccccttgtcttgcccttcaatgctttgtatgatagagtcccgggcccaggggaaaccgatgtcctcatcacaacggcagactgtttgaagattacgacgaggatgtggtgaagagcacgaggactgtgtgcctgaatgacgatgttttgactttggctacttcccggtatggcttcgagggaaacgctggacgagttgatccatgatttatatttggtatttctctgtatatgctaggaaaaacgcagcatttatgtaaacttctctcgtcatggtgtttctaaatgtaatactcccatcagttcaaaaagcagcaatgtctgagggaacggaatgccgagaagtggcagaggaaatccaatacataggtatttatcttgatatatgtaagcaagttctagtctagtcacaacaccagagagctcaggtaacctggaaaataagatgggagttaaaaaatgagctagccgttgagtttcacgtgaagcattggataaataagaaaaaggcggacgcagccgtgaaaccagtctccctaacgccggagataacatatcataagagaacatggaggaaatgcatttgaaaagcacgcaataaggggtatcttcttttcaaatgcatgcaaagataaacgaaagacagtggaaggccaaggccgctagaaaaaaagaagaagggaagaatattcgttgaaaccccgataagctcattagtccaattcaatgaccgtatgttcttgggtgcgaacagccgggctgtgactgccatgagatacattgttcctagggcgtacgggaacagggcccaaagagccttcagccttgcgcttcggagagaaggggttgtctgtcacaggcgagatctcatcagtgtcgtacttgggggtccaggttccatcgactttgatctggattgctctaatcccatcgagtccgttcgttcgggcaagctgggcgtggacatcgacaaggaactgatcaacgaccaagaactgcgggcgtgcatctcccttgcagatcgggcagcgccagttatcgaccatcggtgtcgggccggatacggaatttctggttcttataaaagtgtcacggtcgaagcattcgtggtggaagcaatagcgcgagcgaacaggaatatcgaagatgcgtgccatgaaagggtccaccaggtcgatcgtgaggttgtcggtgaccacggccaaatcatcgtcatcggtggtaggagcaagacgctttttgatggctgcacgagattcggcagctgggacggattggatcaggctgagtatctggtcgaactcggcaacctccatgacctccaccccgaagacgaatttggaggtcttacactcatcctgtcctaagatcatatcgagccgtacgttgttttcgcctgttttgatgtactcggtaatgtccaaaggcagatcttttccgttgtgaacctttcggcgcacatagagctctttgtcgttcacgctaatatagaagacactgggccagaaagtgttcgcagtacaccaggtcttctccgccacagtgtccggattgccaggaagacgaatgcatcgcaggcgaatagtccggcaaccgggcctaaaggtccaaaccgaatgttggctctgtttcccgtgagctatgtgtgggaacttttggcgctcatcatgcgtgaaagagaaattccatgtgtagattggctggtcaacgttgacgatggttgggtgtacaacgaatgttttgagataggtaaacaaatcagtctcgatgtcattaccatccgaaccctgttttaccagcctcttcataggatcgcgaagatcaaccagatgtagaccgagacgcgttggatttggattcaccgtcataggtgctctgtagccaggtaccgggaagaaagcagagttaagcgaaggctggtgatgctgtccctgagccgcacgtgtgaccggtgaagcagacgattgcaaagccgtcgaatgttgtcggttatgatggttactaggcctttgtggtggcatcgggtgctgggccatgtggcttgttgtagtcggcgtcgtggatatggacgatggagcatggagcgattgcgctgactgtgtaggggtgagagcacttgattggagggaggggttagcaggcgatattggagtcattgttcgaccgtgtaattgttgactaggtatttgttgaccatgtgagcctggcagtgattggtgcctcggagaagatgctacttgtccgatcgatgtctgtatgtgcatttgcatctgtgggttcatatgtggatttgtatgcagatacatatgctgttgctgattcatatgtggactccccggataccaccatccgtgttcctgtctcggcccttgcccctgtggtatgggattgtaatgagattgcggggtattctgcatttgtgggtttacgccagattgatagggcccagcagccggtccaacaacctggccccggggggaatttgagggaagctgctgcaaaggtgcaccaattgggcttggagcaggtgaatttgtggcaggttgactgacaccagcaaccgaagatctgggataggaaggtactcctggagtagcttgaggcatggctcgattctgaggtctaggaggtggtgcagagtgggaggatggtgtttgtggtgtttgtggtaggtatttaggcgggaaactgcgatactcttggacgaatttccagttgagagcctgctgagtggtcccgggaagtctagagtccctacacttctcaaaagcttccaaatctttccaaaataacttcagcagggcatccacgtctttgtcatggtgaaggtgccgtgcaacacacgtgaacatcaccgacatcaaaatctgagatggacaagcgagtgattgccaaaggtgagataccaacgggggatgacgagcctggtgcaagattccatgccattcattcgcaagccgtgctaaaaactcaggaacaccagacagcacctgaatgtaccagtttgtgtgcatcaactgctgtggagatgccgggaaatgggcaaatccattggtagcgccatcatgcatctttgcattatcatccagaataagcctgagcaatttcatgcccgcgttggggactctaatttgacccaatgtgcttgcatccgtgctatatcggcagtacaattgatgtatcaccaaatagaaagcatccttacgattaatggcctgctgcaacaggttaatccgaggccgaacaatagtggtctggctcaagtgagcagggggtaatgctccctttgcagacaaatcgtccaccaaggcattcaattgagcagaccattgttcccatgtctcattggggatagccgcaatcccagctcccacattctggagcggactaggtcgtgaccctgacactgcgtgttgctgtgtgctagtacctgtgcgtgtgtctgtgagcgagggggagtctgggggccgatccgctcccattcgagaggactgggtcacgcgttgtgacgcggtgagcccgctcggaggaggttggaccgccatgcgctcatcatcgccacgctgtgccgtgagttgtgtagagattggcggcagcgtggaaggtctatctgagatgatctcatcggcgttgacgggacttgggtgagaatttgtactgagaaccggtgagggaagagccgtcggtcgcgtgtcgggcttttttgccgcatcaacaggaccacgtgcgggaggttgggttagggtctcaccaggcgtgacgggggacattaagacagtctcgctgggaagggatttgggagggactggaggatcaacctcaacgcgaggttttcgcgcggccgaattctccggggcgttagcctgcgggcccatccagtgtctccgcacgccgcctaagaacagactggcagtagtgttggactcctcaatatgatctgcactagcgagcgatcgcgatttaggtgataccatgatgatcgagtaagtgtctgaggcatcaggatgatttggaggttcctttcaataataaagggcgcttacaccgatgtttgattcaaagaatcccagacacctaagcgcctagagaccataataggaatggatccatgcagttgagagtgaaagcgcagtaagcagggggagatgttgcgatagtgacggtcattcgatatgtttgctatagctatcctatactcgattcctctggatctgaatctcaagtgaatctaatccaatctaatccattctaatcctctaatatagatcgggtggacttgggcaagaatgaccgggttcatctgcatacaaggcacatgtacttctgaagtactgtacgaaaacggacctaattgcccaggtatgttgctaattactattcaagctaagcgctaggtagttggtacttatagtgattgtaatcgcaatccctatattatatgtaatcgcagttgtgccacctctcagctcctctccctcaaccacgggaaagtctcccaagtccagactttcttacaatcgcacacgtcactctcgcctttctcttcgaatttgcgtcttaggtttgatattgattcaaatccgagttctgtcaataatttaccaatattcttggtcgcgttgaaaaaagaaaaaaaaaagaaatccaatctatctctacaaggtcgagatccttcgttcgtgctcccgagccccgcgagttgtttaacctaatccttctaatctcccgaatctctagcctttggacttctcacattctctcccctttctcttacccttccgccaaatcacattactcccgagtctcccccagtgggatacgcaattgcaatctgcaatttgcaaatctatccccaagggtgccatgttttgtgttggctcttgactaggatacacggaatattgagatggttaccatgggcccaccgaagggtgttcgtccaggcgacattctggaggttcttcgtaagtgacgtcgtgtgcgacacctcgatttctgtgactccgcgtttttcaggatgcgcccggcttctaacactccaaactagatgaatttggcgggcgcggagaagacgaactggtcatgttaccccgcgacaagattaaactgatcgagttggatgaggaatttggagatgcctggtactacggacaaaacctgaggacgggacaaactggtctcttccctgcaagtatgcgccccttccccaggacccccccccctctcaccacccccgactatgatcccaactaatatttgttgcgcgacagactttaccaaagtgggctccccaagaaagaccctcgccgagtcgccagttctggtagaatcgccgatccaattggaatccctcgcgcgcccagattcatcattcgcatcggctgagagtggacagagcacccctcaagcatcgcgccacgttagctccgacgatatgcagtcaccgcaaatcagttctcccacacagcatcgatccgcctcgtctccgctgcctcgccccagcctggcggccgatattcagcaagcctttcgtggatcgatggacaatcatttgaacggcgaagaaagtccggtcatgaacgagaccttgagcgtcattgacgagcacatcacggatatgaacaccccacgtcacagcgtgtcgacccaggaacccaggacgatcaacgattccggcagcgagtacagcagccatatcggccacagggcttcttacatcaatggaaatgagaccgacgacgaggagcagagtcttccaaccgagcaagaggtgcggaaatggagtccaacacagacctcaagatgcttgcgcagccttggcattgatcaaaaacactgtgacatctttgaagaacaagagttcaccggtgacgtgcttcttgatatggatcaagattttattttcatgaaggagttcgattttggagtcatgggcaggcggctcaagacctggcacaaggtcaaggccttccaagaagagaccaagggcttcagtcagcagcaagccccaagaggctctatctcctccaacttctcaccttccgatgaacgtgcattgtctcgcgctggacacaccggaccacttcttcctcggattcctaccttgtcagaaaagaccggcgctggttatccacgaggctctgtgccggtgcagcacccccgactggccagcaacagcagctcccccatgacaccgcatacccctccgtacagccatgaatcaacgagaaggatttctgcggcatcgctccgtgatctcaaccaagcgcgtcgtcattcttccattgacgccacccaacgaggcatgcctgattcgggttttgttggtcaccagcaaaagaaaccctcattcgaccggtcctggactctgaattccggcccccaagccatgcccgctcgcccaggaacctccgcgggcactagtccgggtggcttccggaatggaccgctgaccgctgaggcagattcttacaactcctatgtcaccaccccggatcagattgaggacctagatcggggttatttctcgggaaccgaggttgattcgcgccgggcccgccgcgttctacagaaacgggggtcggtcggtgtcgatgtaaacaatcagtcacgaaagtcaagctacgcagatgattcataccaagtgatatccccagcgaagcgccactctcgcattggcagtgtggactcgatacgtgacgcagcgaatcgtgtctcccccgcggccaaggcctatcacggcacgccaccgaagagtcggctgcgaagcttgagcacgcgcgtcttaacggataaaagtggaaccagctctcagtcgtcaaccaccgatagcaaaactagtaacggtggtggattcttcgccaacttctctcgtgtcggtggcaaaggtgaatcggaaattcctcgcgcttcgccgttgcaattccagccactgaaaaatgccgggcccaagtttcgccgagccatgggccttcgagccatatccgacgttgctggaaagaagcttgacacatctgcgctgcctgattcgccgctggagtccgatcctacctctgctcgcactggatccacaactccatcggcgacgtccaagagctcggaacggcatagtacagatgggtctggtaaggccaccactgacggacagggattcgtagcccgtcctcgaacggccaagtctaagaaagagactagtgcttatactcggggtcttgagaagaagacaccgcaggagcaaatggatggttgtgactacagtggatggatgaagaagagatcttccaacttgatgaccacctggaagccccgtctgttcgtcctgcgcggtcgtcgtctgtcctattactattccgaggacgacaccgaggaaagaggcttgatcgatatcaccgctcaccgtgtcctacgagcagatcaagatccgatcatcgctctacacgcaaccatcaccggctcaaccgcattacctgccaatgccaacaacaccgtggatagccctagcgggacgaaactcaccactccctcggtcatccaatcgctgaccactaaggacggcagtgggccgttcttcttcaagctggtgcccccaaagtcaggcaactcgcgcactgtgcaattcacaaaaccagccacccactttttccaggttgacaatgtccagcagggtcgtctgtggatgggagcgttgatgaaagcgaccatcgagcgtgacctaggacaggcagtggaaaccaccaacaagcaaaagactattagtctaaaacaggcccggctgctgcagcagcggccggcagatcttgttcctgcttcgggtagcaccaagaccgcgcagaccatcgatgaggaagaggaagaagcgggtctgcaaattgagggtttgaacctcagtcagtctgatgttaactctctcgaggacacgaacggcagtattgatattaacaacacagatgaaggcctcgaacgacctatctcccacccccttggggatttggataatggccagtcgtccttgcttccggatcctctagccaagacggaatctaagtgaacatttattgcggcctctattatttgagtgtgaccttgcttgcaattatgtgaaggacatattttgcccattcttgtttttttttttttttgctggcgtttgatgtgatatacccctcgctcagacttcttccctttgttgactcggcccaatttcgtcattacaggtactttggtcgccgggggatttatgtgggagtatgtgattaacttgcttatcgacacaaagttgactggatctgagcgttcttttctattaatcgcgattgcaaatgtagataatacaataattcatacaaccatccatcccatggatggctaattgcttctaatcctcatttccatagttcccaccgcccagtataccgccaagtcttagcactggcagtatatagccaccatcctactaacattgtatacaaacagcttaattgggatatctttgatactagatcatcaatccttggatgggactgttcaaaatgtcatgactataagttcttcttttgtcttgggtacttcgatcctatagcagatgtcaccgtgtatatgtgcgctgtctttatcgattagcgtccgcacttttgtttcttctccttttcaccattaaagacaactcttttcaatatgctgtataggtctttataacatttattcttttcctgtcattttagattcctcatgttcctccgctggctgctctcccgcacctttgcgctccttcttccactcacagtgatcgccactgtttacctctatctctacccagtcttcaacggatgcgcctttcctctaccacagtctacctcacggtcgagtgagcagcagctataccataattcagtgatcaacacacttctccaacaccttggcgtttcaacctcagactcaaacagtcaacctgccatctttagactcctagtcctcgcagacccccaattggaaggcgacacctcgcttcctctccccgaatatgaattatacccccgcattcagactcactggcgcgccatccaggaagcaatcgggaacgcctccacatcacctctactggacgaggacgtcctctcaaacattacaactggtctccagaccctcgcaaccgaagacatcccacgcgccttcaaatcaggcctgaaacgcatcgacctctttggcaacgactactacctcgcgcatatctaccgcacactcttttggtggacccggccgacacacacaacggtgctgggcgacttagtggggagccaatggatctccgacgacgaattcgcccggcgcagacaccggtactgggaccgcgtgttccgcggcggagagcgagttgacgacaacatcaccagaaccggtgctgcgggttggagccagagcgaaggcagcaatgcgccgccattagaacccctaggcgcggatcgggcctgggccaggcgcgtgatcaacgtcgcgggaaaccacgatattggatatgcgggggacatcagcgaggcgcggatggagcgttttgagcgtgcgtttggccgtgcgaattgggatgtgcggttcgaacacccgcccgtcttgtcctcatctgggtctgctggagaccaagttgttacccctactctacacttgattaacttcaattccctcatgtttgatacccccgcgctttctacggaggttcagagccatacgtattcttatctgaatgagcttatcgccgatcgagtctcgccggtcgaggaccgatcggcttttactttgcttctgacacatatacccctgcacaaggaagacggcgtttgcacggacgggccgtatttctcatttcgtgattctgacgacaaggacggtcccgacggtgtgccccggtggcttaacggtggtctcaaggagcagaaccatctcagcgacacactcagcgctagcgggatcctgcaaggcatatttgggctgagcggcgatgagaatgcgcttgctggtggccaaggccgaaacgggctcattcttacggggcatgaccacaccggctgcgatactgtccatttcgtcaaccgcactgaaacagtcggtgacgacggttcgcctcgatcttgggagtgggctgcgaagcgcttcaatgagagccagcacattgacgacccttctatccgggaggtgaccctccgctcgatgatgggagagttcggtggtaatgccggtctcctttcggcgtggtttgatgaggtcgctggcgaatggagctatgatatcactatgtgtccagctggcgtgcagcatatctggtgggcggttcatatcctcgtgctagtgacgctaggcgtggctctgcttttgttcttgtctggtaatgctcagccgaagacgactacttgtaacgtccagtcagaccagaagacccaaaacagacagaagaaataattgggtcgtagaactgtgttttcctgtattaatagcattggatgaccgagcgtcttgcatttggatacatatattgcagactagtactccgtatatattttcaaaataccctcaatcagatatagaagtgtatgagttgacctttgttggagtcatgccttgttgtacagttgcgtagagatagatccgtttacagaaggcatataaaggacctacgaagggtctacgtaaagccattggtggtcatatcagagttcatatatcggccaaagaacaaacaaccaggaccaggtccccctcccatacagctcgcctagagcctctaggccagccctcgaggtaatgggcaaggcgttgcgaaaggatgtgattattttaaagtaatacttccgagagtcgccagcaaagggagggagaaaagacgaagatgggggatggaaccggctttaaaataaaaacagttggatttcgtcaaatggacaccacctgtccagctcccattttaatcctatggtctcatatgcaccgcattccaggtcccaagcagatttgaggtttggtatcgttctttttctttaaaattcgggttttctctctttacataacgacaccggagttggaggcaatacgctggaaaagaagtgttagctttttgaatgagagcattcgggaatggaaaaggaatccatttcccatgtggaagtgtataacgtacgggccagagctcagcagcttcctttccgacgggaccggtgatagcggaacccttcatctcacccttggcgttgacgataactcctgcgttgtcctcgaagtacaggaagataccgtcggggcggcgccaaggcttgctctggcggacaaccacagcgggcatgaccttcttgcggagctcgggctttcccttcttgacggtggccatgaccatgtctccgacaccggcagcggggagacggttcaggcgggcaccgatacccttgacggagatgatgtacaggttgcgagcaccggagttgtcgcagcagttcatcacggcgccactgtttgacgaaaatagacccgttagtaaattgttctagatcttgaagacgtcgtgttttcgaatgctgaaagtggagatccaattttcttttcctttcttcccgccgatctttttcgtttgttgcatggcgagtgttttttctgatgacgtttgatcgactgaaaatgacatgtgggatccggcgggcaagaaaggcgcattcgaaacagactagacgataagaaattggtagacgtacacaggcagaccgagagtcatcttgagcttgttgccggcggcaccgccacgactgtttgatcgttagtaatttcctctttgtcgattcgttcttttcccaatccgagccccattcgatcctctcgacacgaaggtgttgtgttgcttgtcgcttgcaaaattattctgtatcggttcggaatcgaatgggaccacgtagggaatcgctggaagactcaccctctcttagacatgatggctgatgatcacgggggaagttggtgaaaaaggttggcgacaagaggtcgaacgtcgaggatctaaaccggaggtgtgctttctcgcttagtgggcaaagtgcgtaaaatcttggcattggaaggtgattggctgttcagacccatcagctttgccctaatactaacccgatctgggatagtgccaaattttaatgcctgaggcataaactctatacttctagggttcagatgttgtgacgttttgaaagattgcatttcactgaatagtacatttgcaaaaaaaaataggtgaaaggaaaagcagatagcacagggatgaagataaaatatgagatgattcattgaaagtccataaaagcaacccgccatcccctgaaatatttcgaggttaaacctcgatgtgagtctgctacgagtaatgccttcccagtgccaaacaagattcgagcacgctgttaaaccgataacacctttctgccattgtccgttgcgccagatccgatattgtcgtctttgcatcacagctgattactcctctttcttgggttctgtcttgtgttccaagctctcttccttggtggccgttgcctcggtgtccgcagtaggagcagaggcttctgcagtcctctcaagggtagagtcggtagcctctttcgtaggggattgggcccgcacaggggaggcagtggagccctcggtcactgatttctcctcaataactgacgcttgagccggagcttgttctgatgtagtagcttcagggacagcagaagcgtcctccatggtagtatcttcatcatgagggggaggagactggtgttgagaggtagtagaggcttcatgctcctcactttccatagccatgttatcagcatcagtcatgggggtttcatcagcgtgcgaagcttctaaggcggcagaaggcgcctcgggttcagtgcgtggggcattggccatcttagtatcaaggccgaaatccatttctacatcaaccgtagatgagccatcttgcggggttgccatgccactatccagcccagagtccggctcgagatttcggtagttgacttggttgcgacgccgcatgacgcctggttggcgacggataccgttggcggcgttctcgtcttcgtcctcgctgtcactgagctcgccagtcttttctgtgcgctggtcgaatcgtcgttgtgtgaaccgcttgtctttgttctcatcctcatcgaggtcatccataacgtcatcagcctcgtcgtctatgccacccacgatagggttacgcggtacatctgtcatttgaaccgaaggagcaaatgccgtgcgcttcaggttttcaacaacctggttgcaaatcttgtccaggtattctctggtgttggcgttgtccatgttggaggggcggacatcgagctgataatcaggagcgaagtactaatgcaattagtaagtgttatttgatctggaagatataagaaacttacctcatagtagtcattgtatggcagctcagatcccaggggctgtccgacaaggataccggtctcataagcccatgttcgtgcaacgttgcgcatggtgtagccaccaccgccaacaaccaaggttggcagatcgaaactcttgacgaagttgacacagttggcatgtcctcgcatactcagattgaagcagcccaagcgatcgccggatagactgtcaccaccgcactgaaggaccacggcctcgggacggtaccactccatcacgctcttaatgacaggctcaaagatgctcttatatgtgacatcagtgatgccatcccggagaggaaagttgactgcgtagtttttgccctgcccgacaccgatgtcgcgaagctcaccagtaccagggaagtactcgccgtacttgtggaaagaacaggtcatgacgcgatcagtcgtgtagaaggcctcttcgacaccatcaccgtggtggacatcaatatcgacataaagaactcgctgtttgaagcgcagaagctccagaattccaagaacgatatctacatagatgttagcttctgagacagatgcttggagaccaagggactataccattgacatagcagaagccactcgcttcgctcttcttggcgtggtgaagaccaccagcccagttgacggcaacatcgcatttgttgcggttcagtcgcgcagcaccttccatgctgcctccggcgctaattccacagaactcaaagagaccgtcaaacacggggcaatcgtctcctacattgtaccggctctgttccttcacgaagtggtccatattgtccggtgtgaccttggacaggaagtcgatatattcgtcggtgtggaactgggtcatctcgtacttggaggcaggtttcgcacgctgatttattagtgcaagggtcaaacaaataaaaataggagagtgctcacgtagatctccattttcttatagaggccatagttcatcaccaagctgtgtgtcatgcgtatgcgatggggcttcatggggtggccggatacataggcatagttgcccacatcggagtcgtagaagtaagcgactttcttatttttagacccgagaagcctatcagagataggttccaaagccatgttgcagagagcgctgatgattcacgaggttgagagtggaaaagagagtggaaaaagaagtgaagttcaagaagtgtaagtgagatccggggaatgaagtagcgaagttgcaggcgcaatgcagatatgcacccaagaggttgaataggcaacgatggcacctattgtcaccagatcccgcaatgcgaagattaggtagcagtacttaatcacaatagcaagccaatgtcattgttcacgctattgaagaatagattgaggagagagattcgcccgcgaaggagcggaagccgaccgaaccacacaccgccttcgtcaggcaaagctcccacggctttgctcatcatcacttaacacgtcttcgacaaccttgttatcttctcgctaaaatcacatctgtcggggattttcgctaatttgtatctctctttgaacgctgttccggaaataccaagctactagagacaaatcgatttgctccggagctcccaaatagcgatagcttcgtcctctctactctcgtttcatcaagtcttgtcggatatctcttaactatggatcgtcttaaccggatgctccaggccgctcaaggcatggggatgggaggcgctgctcctggtggtgtaagttggataagactaatctccttgttggaaggcattaatggcaacatcctagcctagcttcaccacgtttctctacattgactaatgagagccgttatttaggatactccaaacctgatagataactcagaaaccgtccacatctcctccttggctctgctgaagatgctacgacatggccgcgcgggtgtcccgatggaggtcatgggcctgatgctgggcgagttcgttgatgaatacacagttcgggtagtggacgtctttgctatgcctcagagcggtactggagtcagtgttgaagcagtggaccccgtgttccaaactagaatgatggaaatgctgcgacagacgggacggtaagcctattagctggtatataataggggagtcctccatgctgatgatttcgtacagaccagaaactgttgttggctggtaccactcgcatcccggtttcggctgctggctctcctcagtcgatatcaacactcagcaatcctttgagcagctcacaccgcgtgcggttgccgttgtcgtcgatcctatccagtcagtgaagggcaaggtcgtcattgacgccttccgtctcatccaacctcagacagtggtgatgggtcaagagccccgccagactacatcaaacttgggccacctcaacaagccttcgatccaggctctgatccacggtctcaaccgccactattacagcattgcaattgactaccgtaagacaggattggaagagaacatgttgatgaaccttcacaagcatgtatggaccgaggccttggagatgagtgacttccacgaggagggtcagcacaatgtggagcgcatgaagcagcttgttctccttgcggagggctacgagaagcggatcaaagaagagacggagctgagcaaggatcagctgaagacgagatacgttggcaagcttgatcccaagaagcgtatgtttttcccaagacccccccccccccccaaannnnnnnnnnnnnnnnnnnnnnnnnnnnnnnnnnnnnnnnnnnnnnnnnnnnnnnnnnnnnnnnnnnnnnnnnnnnnnnnnnnnnnnnnnnnnnnnnnnnnnnnnnnnnnnnnnnnnnnnnnnnnnnnnnnnnnnnnnnnnnnnnnnnnnnnnnnnnnnnnnnnnnnnnntgatcccaagaagcgtttttttttcccaaagcccccccccccccccaaaaacatagactgacgctttgcagacatcgaggacgtaagccaaaagttgattgaggataacattgttgccgtctcgcggcagatgattgacaaggaagcttcggtggcacggcagtcattcaaggaagacacgaacggtgctgccatggaagttgatgaagatctctaaagagttagaaaagggtgccaatcaaaccgcattaattatttctgattggttggactttatgttaccaaaccagaccaacagatgaatgaaatctactcgaattttcacataataataagaaattcattgtcaacaagaatggcgcttggcctattgttggaagtaagtgtacctataattctgtttcatgggatctatgcggcgcgcaatatatatatatatataatcgtaacagtatgaataatatccaccgaataatgaactatcaagactccaacttgactgtctgaagcgagttgctcaaggcttcgagaacaccaggggagtaggcccgtaggccatcaaaggcaacatcaacgtcattgtgctcatgtttctcgtgagtgtcgtattgagtgtcgtattgagtgtcggtccagcctctatcaggaccccaaaggacctttttctgagcatctcgagtttccgtaagcaagcgagtcatcaaaggtccattcttttctacagagggccaggcatcgaactcaacctgaactagacccggcagccgttccaaaatttgatgtaacaatttgccacagaagttggtatagtaatccttggagatacgaaagccctcgaacacagggtgtgaagggtcacactgcacaaacactttcaacgtgcgcacaagctccatgtcatgtaaacccaagccttggtttacaacccatgacttcgggggtgcagtccagcttgatcccacaataaattcgattgtggtgatcgaagagcggtggcgtggaggcaaagcccggatcgtgggcatgcgtaagaaatcctggataggaaacacacggaaggtctgggttgaatagaagtagtgagtggcttcgtcgtggatttgtctcgagacaaggaacagggcgatgcggtgtgagaacggcgctagaggtttgctcttcttcgccgaagacccaacattgccaccagtgcgtttcgatgcactctttcgagtcggcgtgaataggacaagattataaatgcgcaggcgaatctcagacggtagatggaggaagggaaattgcagtaagatcggaggttcagcgtctgtttcggattcggcgtcggaaagttgctcctcaaaacggagcatgttctttttgaaccccatgattgaaaggtatgtagatgaaatttatgggatacaggcgagtctagatttggacaggaagatcatatttctggtaaacaggtagaaagagaagaagaaaactaaaaagatttgtgtcccacgatcggagcgcagcttcacgggtaaatcctttgctgcgctcttggtagtgggaatgaagaaggtcttcgttggtctccccagctaatacaacccggcatgcagagagaagttgcttgataggtcaaattaatgtctgggtgaactttctgaagaagaaaagaaaaaaagaagaagactcggtggccgaggatgtcgatatataaacaacctgcacggatggttcgggtccaccgccgtaccgaatcgcgccgacttttaacgggagaccgtggtttatcccatcattcagaacatatttgtttcaacccaatacacaatgcttagtcgtgcagtcttgcctctaacgaggccaaatgccttcgcatctgccgttcgggcatcaaccctgtcggcgcggccttcgttgtacgctgcctacaagctttccccgggtatccagctaagggcgaagtcgaccaaaccgaagtcgaaaacttccaaagcagctccgaaagaagctccgaaagacttcgacgcagagcaacccgagtttgatacaaaagctgaacctacacaaccttctgaacctgtgaggcttctttcaactttccattgaaaggaatccctctgacgttgtctttctaggtcgaacaacccccacagacgcctcttcccgatctgacgcaaggtattccatcgacgctagccgcagaattggaagggcgtatgaagaagggaccattgaatctcacagaagaccctacccagtcagaagattatggcgcggaaggcagaggtggtggtgacatccccaaaggcggatatgagacatccatcgaccgccgcaaggcccgtatggccaatatagtatacgcagtcatgttgcttggtggtgtcgctggtatgggctatttgggtcgcaactgggaaaccgaagaggagcagcggcaacaccctgagattccgtcgggatggagcccgggtctttggtacagccgtatcaaagcccgcaccagcgatctcaccagctattacaaggaccctgctttccccaagctgcttccggatgaggacgccgagatgcgtcagccatacaccttggtgctcagtcttgaggatctccttgttcacagcgaatggacccgtgagcacggatggcgcgttgcgaagcggcctggtgtcgactacttcctccgctacctgaaccaatactatgagctcgtcctgttcactagtgtgcctagtatgatggccgaccaagtcctacgcaaactcgacccttaccgcatcatccgctggcccctgttccgggaggcgacccgatacaaggatggagagtacatcaaggtatgtattcttctttcccccccagtcatataatgctaattgtctgataggatttgcaatacctcaaccgcgacctttccaaagttattctcatcgacactaaggaggagcacgcccgctaccagcccgagaacgccattattcttgacaagtggactggagacccgaaagataagacgctggtcgccctcatccccttcctggaataccttgctggtatgggtgtcgaagacgtgcgtaccgtgctgaagtcgtttgatggcactcccatccccattgagtttgccaagcgtgagaaggcgatgcgtgagcgctttgagaaggacctcgccgaggagcagaagaagaggccctcgcgtggtctgggcaactttgctgctgcacttggcttgaagtcttctgtcaccctgaacggcgaacagacaccctccgagggtctggcgcagggtaagatgctctgggatcagatccgcgagcgtggtcaaaagaactacgaaatgatcgagtcagagatccgtcagaacggcgagaagtggctcgctgagatggcagccgaggaggagaaggcccgccaggagcagatgcagagcatgaagggctctttcaccggcatatttggtgctggctccaagaatgagtaatcggcgcaagccaattacttttctcctctagcagatcatcaggggtctgtttaatgaactagtgtaaaataggtagggtttggggttttggatttttgtacaaaattttagtcagaaattttaatatgagaaagactgagatttggactgatatcgaggtcgttgggctttggatcccagggtatattgttgaaataggaatctagaaatatatgttcaatgagcttttttgatcatgtcaggttcacatcttggaagacggagacatcccatattcctgtcatatcaaagggaaaaccgtccatcgttccaaaagtattcgatatcgacatcatgtcgtcaacgatatcgttatttgtttgggtttctggcagcgatattgcggccgggttgaccagcccgctgtctgccatcgcggttgtgaatgcctggtccattgtggcaccagttccgggaagtcggtgcataatgcgttcgcagtggtctaggcacatgtctgctacatcccagtcttcttcttcccgcacacgacgcaatactgagcgcagggtttcgacgttggaaagacaggatcgtgcaacatcgctatcggtggtctcgaatgcacaacgaactagcaatgtcgccgttgacgtgagatgaaaagcgctatctgtcaagaagattaggaacaaaaagcgatgtatagaaagaatacttcaacttacagggtagccagaactcagtgaaattatcttttcgcaaagacgttatgaatccaacaatctcctctgcagaccttctgcattccgtttggaaatagcgacgtgcctcggtgttttccgtttcagagttgttgacttcctgcgaggttgttagaaaccatcctttcgattttcccgctcctccggcttacatttagttcaactcggctgacaagcattttgacggccaagaaagccagttgcaagctgcttgctccatatatccgttccccggtatggattgtgggtcctctcaaccagtccggtagtgagtcttcccatatatctaaatctgttcgtatttgtctaagcttcttggatgtctcgcgtgcaggtttgtgttgcaacccataaaccagtggcaacagctcgcctaaagtctcggtcaaccggcataggtagatgtgacagtgtgctgctctcacacgctctgtagtgcggaggtttgatgggactaatacctctacggtgggtagaggcacgtcatattgatttttggaaatctggggtgggacaccatgaccaaagcttcccctatttattgtcaggtttgttgcaagccaaaagaaaaaccgaacgagcttaccaacgatcgtgaatcacaaccccccaccacaggcgaatccgctggtttttttctgcttgtgagagcttccaattgctaggatcacggttcaagccaaggcaatttgccaaagataacatgcggccacagctgacggcgttgccagtcatggagaaaatgggtcttcctgttaggtcgatcagcgcggcgctgattgtgtccaatccgggtgctgagaattcctcatgcaacgcggcgacagtcatgttgatcgcatatcgtacgtcgggcttcggatgacacgcaagcttttgggtgtgtttccaatatacgagggacatggaatagacttgacacactagtgcagctggtgggtcgtgcaggtcatcggcgatgaatgattcccagaacgattccccgtcaaagattggaaaagaaacgttaaaacgatcaatgaagctagagggggaaatattagcagggtagaaaatggaaggaaaggccaatggtcaacatacagtctcactaggtcgtgtttgaagggcccgagtatttgttcgagtacctccttctggttctcaccaggaggcgttcctttccgcatacctttccttcgccgggagatggtggtgtaaaggactggtttccgtgggtcgctagagtagatattgtacgggtggctgttgggctcttccgattgactcgaccgctctgggggcatatgcttttcaatgacttgggcatcctcggcgaccatagggccaacaatgagaactgactcattctgaggatcatccatatctttccgccgcagatcactttctcgacgaccacccgacgaagtcgttccatgggggctcggcccatttatcggctgccggggcgggttattttggcccatgtgggtgagttcatctgaactacgtttacgcttatgtcccggcatggcctccaacgatggaggccccggccaggatttccggtccgcgccactcaaaaccgaagcatccgcgttggcttcctcttgatagtgacagtcggcaccttgaacgcgacatagaagacaggattgaccggggatatcgacggtacatcgagacttgcgcttgcgacacaagtcacaggcgcggaccttatgggaacggtacggtcgggcgccggcattgaatccgggagatggaagtttggacgaggaattgacttgaactggtgcaggcgacatgatgtgcacccaagtatgaggcagttatgccgagggataatacggggaaagcgaagatggtgatttggagattttggtcggggtgttctgggagtcggccgattggcggttggacaaagtgaggggtatgagcacgaggcctgcaaggtagggagaagaccagatcggaattgggagctccaaattggctggaaaccgtacacgagatgtcgaggctacatgcacatcatattgtgcaaaggaggtccccccagatatcagaatccggcgatctcattttcttatcaaaaattgaactgcgggcatccatggatccatgtggggaatgctgactcatgccacgtgaaatcgctgacataatgactttctgcctcaggcgcgttctatttttatctttggacttggcgtgcgtagacaataatgcaggcgatcgacatgagttgtttcattgacattggtgtcccgcattgccttatggggcaagaaactgcacagccacaaggtcatctttttctcaacaatgtccgcggcgagcttgatctgttgtatgtaggtcgagagcggtcatcatggtggatacctcccctttcgaggactctttcgtccatcaagcgggctcttctgtatcgcccggcctaaagacatactttgaccggctaccacttaacgtgattgagcagtaagtttctatctcaccaggtagtcgcaaccttgtgttcgtccgacatgtggccttacggtcagtcattgactgcaattctgactaagtcaatagtatcctgtatgcgtccgatgccaatacatttgcatcactatctctgctaaaccgaagatggaaacatgcgtccgattccgcggcattgtatgcctatcaattgtctcgctgttcatcattttcctgggctcgcggggtcatttctgaggcagaaaatctgactaaactcaagcgccaatttgttaagcaggtcaggcaaaacgcgtttgatgcatttttacggcctcggcaaactctcctgcgattaatttcaagttctatgagctcgtcgatggccttcccacagggtgaagtttttcgattctcattttcaggaaatggtcaaatggtgctctgcatcagctcttctcgcattgtcatactagacgtggccaccgacccagtcgccgtcaaacatgaacttataactcgaaggcggcccctaagagccgcaatccgtgatgacggctctctcattgccgttttgtcctccacgcatcgagttcatatctacaagctctctgacgatgaagccaagcacattcgagttatcactctggatgatgctccaagatatattaaattctctccatcaggtagtgtgctagccttagcctttgaggatagtattgaggtatacgctgtggctgaagaggctttgtcgaccgaccgtcgggcggtgcgttgtcaccgtgtcgatgcactttcattttcgcctgacggatcgatgcttcttggctttacggctgaaggtatcgtcaccatcactcctccgttttataccgagactggaacggatgcctcacccgaagaactcgagatgcgaatgtggacaacacaaattctcttccctgagacaattagttgccctatcactcacgtctccctgattgctggttatgaggaagccgatgatcactgggtgatgggatatgacaaacatttgggggcgttcagagcaatccaattaaacaagaatgccggaatcgtttatttcgccagtccattcctcgcagatgaatctcgggaaatgcaaccaagcatgagacccgccacagatgaaactggagagctttcagctttagggttccaagattcagaactgtggatatatgggatgcctggcttgggtgctagtggaatcactgatacccaggttggtggtgatcatcattatggaggttgcgcgcctcgcgacaatctagcacagcttcagaagatcgttcaacaacctaagatcttgatacgggggcggcgggtgagtgacatgcacgggatcacatccgctcattgggtacgttcggattcaaaatgccgtcggagactagtcgcggtagcacctggtggtgtacgaccacagaaccttggccgagaagatattccagttgatggtggtcgaatcctcctccttgattttgagcgctctaccatgaatggtgaaacgactgagcttgacatcgaagttggagaaacggcacccaagattcttatggagccggactcctctttggccacggaagttgagcttgaaagaaggcgaacacgactacatcgtggcgatactgctacaagattcgcggatcttggccattcagcgactactcgagaatcccgagctctgccacttcatttccgccgcaacagtctcgcaattcctacctcgccaagcgagacttctcccggcgatataatcgaccttccatatgacaatacgcagcctcgttccagtgaagttctccatcgagctgccactgtggctgcatcaacccgtgggcgatatgaccctcgatatcgtaattcccacgcccctcgacagattccccatgagagtgacgccgataactgggtgccaccccctcccccctacacagcggatccattgccagatggtctaccgagaacgcctctttccccagtcaatgttgtcgattctgtcccccagcctgaaagagaagcaaccgctcgtgtcgcgcagcatccaacccgcccacgtccacaatctgtcaatctacaggggctcggcggtatgactggcgccaggcgcaggggaagttccatcggcagagacttcaacccagatcaattaatcccccaagattctttcacaaacaacttcgcaccacaacagcctggatctgccttaaatccacctacagtgatccaacctaccacgcctacgtttgctgtgtatccatccgaaccactcctacaagagagcaacatgcctcttccctacttgaggtcctcggcactgggcgatgcacttggcgatgcctactttccatactctgtgtcctcgccaaaccttctccatatcccacagccatatgaagacgggcagggcactgcagcagatgacgagcatgacgtacctgagaggcaacggtctttccacaggcgagtctcaaccgaaccctctagcttaccgccaccaacgaacgaggaatggcgtcggcgcattcaggattggaacgataacacaattaaggagcggagccgtaagcgaagggggaagtgcactgtcatgtagcctgttttaccatatatccaattttcccgtctagaataactgtcaaattattaaaacaaatatttgtttccagcataatagtcatatcttaccacctccctctcatccgaggtcaaccgctgattcgttcgctcccaaatcctgctccgaagtcgacgtagagggtgctttcctcttgtagcccgaccttggaaagaccacgccaggacctcacccaaatgtaagtgaatcatcgctgtagcccgttggtggaatttctcgtatgcatgttgcaatctttccctcggtttctttgtgccgaatctgggctaattgccgcatcggggtgactggaggggtgtgaaaagtgacgcctgtactacgctttgaatgccatgagctctgctcggtcaaccaggagggacgaattgataaactcggttaagttctcctggttcggcatgattgctccaatcctatcgtttgcgtagagggtctagagccacagacgccggttggaccatcaaacagcactgggtccgagcctctcttgcatgacgaggatggttcttgcagatctccagtctcttgttaatgctgtgagaacaacaagcattgatactgttagtcaaggtgatcggaacccgatcccattttgtcgatgttgtcagtataatctttagctggcggcctgactgtctccccatcagcaatcgactttgccattttgttggcatctaatagtagccttctctggctgtaatgctgagttcttttaagacaatttacatattgaagataattatgtctatagtatcagtagatcactcctctatacacaaagggtctttggagaaaagcctgtgctgagtcgatcctgccagcttcaactgcatgtttcctttccttcttgagatctaccaccattagaccacagctgctttttaataggactacaagatcaagaataatcacaacggaacaatattattgaattgaccgaggtgaagaaagacaatcaaaaatcaacaacaaaaaggctatgctttgtggggtatcactgaaacaacaaaaaaagatcccagtttggatctgtacaaacaaaacacaaggaacccacacaacgcgcatgctcatcccagttttaatatccccttgtaccatgtcccatgtttcatatcccatcatgatccggagaccatacaccaaagccggagtttaaccggtaagaaaggaaacactgggagcactgatgaatcgatggaaggagtcacggaccctggaaaagctagcagtcagtaaatggaaatacaaagtggagacgaccataaaataccagaattttcttctttcttcgaaatgatagttgtttttgttggttcctattcaagggcctcttttcttggatgcccgaggaggatgaaggtagaaagtggtcccgaaggttgtcggaatgtctgtccaggaggcctattccaaggtctgaatggaaggaaacgtatcgagcaaaattgatgatggacgtgaagaggcttgtccagaaacctgtttcaaggcccgcggagagaagaaacaaaggtaattgaatctgaattgagtgactgatcctctcttgattttgttggattgacgtagaagcatgctggaaatcaacggtccgatatatggtcatggcgttcttgatccagccaaggcttgtcccatagcccagtgagaaaccacttaacctgagttgaccggcaggtggtgtggttatgataagctgagatcaaattgtttggttttctcccaatttccgtccaactgaagccgtcccgtaagctcagtggaagtctttcttttccaggtaatcaaagcctgatctttttgggaaaactgactgttttcatgtcggttgaatgatggatgcacatgaatgaccgtggggtcaagtggttggagtatggaatggcaggttcggtgattgttgtcctgcaaaagaataaggaatgaactcagccaagacctcgttaccaagaggctgtggcgaggaatgtagtacatggaatagtgttcacagatagtcgatgtgaacccaacaggattggatttgaaggcatgcgaaagacgatcaagatgtgtttttaatcgaacatctctccaggaggtcatgaacagcccgatcgtacgagattccgtttgattgttgatgcagccgagggcgaacgacactggagagaagatgatgataaactcgaagagggtaagatggtcgactaaggatgcagtcggctcgccgtggataaggattgaccgatgcgacttctgttcttcgatttaatggtcgcgcccttggactgagcctcaattggagaatgaggcacagcgaaggaatattttgcaagggtggccgtggtcgagagccgaagaacagaaatagaatggacaaatcccaaaagtgacgtgtcgcaagagagatctctcaccttaagtgaaggtgagaaatgaagtgagagtgaggtgaggccagatcttttttttgttgattgtcatcatttttttctcactgtctctttttttttgtttttttttgtttttgttttttttttcttgcatattggtcagtcaactcaatctccaacccaaataccatacgaaaagcttctgagaacgctcaacgcggccccaacacagcattgtaccagcaaacaaaagcgctgcgggacagccaagaaggacctaaacaaccctccgaagagaggagttccttcgaggtgtcccactcagacacttttgcggctggtacatgtcccagcttcaccgaagcgtctaggcaggacgctgtcgacggcgacggccgcgggactgctggggaaggacatcattgggcgaagtcgtaccacagtccgtaggagtatcaatgcccacattcgcgaacaagggagttggagagagaggaccactctgcggatcaccctgctcctccagacggccaggaacgaagaccggagccacagccgacaaaggcgtcgagctcgaagacatcgcaagagaagcactggaagcgtaagaggctaaaacattggaatgttttagttccttcttttcctgttgtgctttctttgcatcgcgacgtctctttgcttgcgacggacggcatttcctcctgtagtgccgcggggtggaaacaggacgctcatcttccgcaccgttaccagtcgattccgcagccggagcctcagaatcggactggtcggaggcgtagatatcactcgagttccaagggtgccgagaaaccaagttcgtgcgagcgtcatccgtagtgttaaccggtattatggaatcgcaggccgattccgggtccagtgacggctcatctcccaggcctttggtgatccggtggacccagataccggcaaacagagagagaaccgacacatgagacacagactcgggacaactgtctgcagccatgacccaagcaagaatttcctcatccgtttcagtcgggcccgcgagcagacgatccatctccctttcaaaggaagatgaatcatcctcggccacaaattgcacacgtgcaatctgcggttggccctcgagaaccttcagagtccactcaatcaaggtttcaagaccggagaacaattgccgtgagtaagcaatcaaagcccaggggatctggacgaagcaccatatagcgataaacaacaacgtggcgacgaaaccttgcccgggcttggacctaggcgagtggatgtcgacaaactccttgggatcagaagatgtcactccgtcgcttgaccaagaggaaaccgggatgggtaccaggaacggggttggaaaccaggacggcatatcatcgaccagctcaggccggacgatgatatccgtaccaaggaaaagaaccatgtccgtcgagtttgaatacccatggccaacgtgagagcgcgactcccatacaggatgctcgcgccgggaagcatgtccgcactcggaggcaacaacgttcaccacgtcacagaaggcccaagattccatcgtcagctggaacgtaccagacagacgccgcacgaacgactgccctggaacagtgaaccccgggatggggaaccactgactccagagagtcatgcccacgaagatccccaagaagggaatcaacatgttgaaattttttttttctgcacagggaagacaaaaagattagcagttttgtcaacagaaagagtctgagatagaaaggaattacttttttaaaaataaaattgaaaaataaaggccggcgaggccgaggacgcgggggaagcagaaaggtcacagcgcagggggcgctgttggaaagtgtgttggtaacttagggagagaagagagagagaagaaggaaagaggaaagtgaggggaggagaggctttataggaaatcctgggaggtccctgggggctcaaacggaaggtgcctgcccaaaagggaaggaacgatggacacaatgggcacaatggcacgtgtatcccccattgtattcacgttttaggaagtggcgactaccataaaaggactagtagcccagaaagcagcccagaaagggactagtagcaacctattgtcccccagggctgacgattgagcccattgagcccattgagcaccttcaatttagaatggctggagctaccgaaaagggactagtagactattcagccttaattttgatagccatgccaaggttccattgcttcaggctctaggttttcgtatttgtattcgtagatgccagcttggatcggtctcttcgttgtagaacttgcagataagtattaacctcacttgacacttgcactagagagcaactgagagatatgtacaatgctatatacattacaggtatctgtagtctgtctggtcaaaatgtcaggctttggggggcaggtgcatgtctcatgactctaggcttttgttttatattgcaggtacactgaggcttcttggctgtctaacctctcactttagatagcattatgatcacgagatctgatgttaactagctttcattttgccttcatggtatactggaattgtaactattcgtcgtcaagatggccatcgcattgatgtatccccgcgaggtgacatcgtcacctcatatcagaacaccaggctttggagagcattcccaactcactcaaaacgagttattaagcagtgcttgtcagatttcagtacgataacgcgccggttatccagcttaaataccatacgaatgttcgagagactttacaatcatgacggcctcactggtctgtctccgtcgtgcccaaaatcgtcgtcgatctgaaaacccctgctcctccctccacgagtcgaatcacaatcacattggaaagtcctatcctcccggggcctgcggggcccatatcaagcgagaatatgatgatatggatcgagatgcaacattgggggctgtcgagctcttcgtccgacacggcttagaagtccaaattcctaggctcgcaggactctactgtgaaatttgcatctcatcatatcaaaactacgacaagtgcaggcagcacacgaaaccgatatctaccatctcgaccgagacgacaccttcctacacattttcggagaaggtaggcaagactgaagcctccacacaccatcatcgagctaagcaaaagccccaaccgtctaaagaaccggctactgccacctacaggtcaaatgcttccgatctaccattacaaaccgagtataagtcgcaaatatgtttgccgaaacagcacaaccacagctaccccttatctgctcgggcaagcaagcatacgttccgcgaagactgagcggcgataggaaatggtttagaaaacgatgactatatttggatttgatacggtctgtggattgtcataatgattttgtatactgccgaccaacctccacatacagatgggagatcaccgtaaacttttatatatctgagtttgccaaggctttgtatgagcgttttcccttggaaagcctaaagtatgttattttactaccaccatccctaacaaatcccgggaggggcttgaatttccgtctaagtagtctcctttgccatttttgcggtgttcttggtactccagttggtaagttgtcgccgcctttgttttgtgacatctcataccggcgaagactggagtcaatataaccttcggttcgatattgaggatgtctgaaacctccagggctaccttgattcgcttgattaactctcaaatctatctagatgacagataacacctttcttttttgttggagtatttcctcctggtgctctagttgtgaggttttcaagtcggttcgaaacttgtttcgtttaaacaacgtagatcttattttatatgagaccctaggccaataagagaacggcattctctgatttcttaaatatgtgggaactgttaatttcggactctaaatcaacatctaaccctggtctggatcagatagacagtttgatatagccgatagaggaaataaagagcgatagtcaagttgctgacaagtattatgtctcttggcgatctatactcgaagaatataagttgacttaaggaacatccaagtagacaccgatgactaggatcacaacagtatcattggaatgtacgtacgcgttagtagcggattatcgtgctaataaatgttttaatgcaaacctttggtctttcattttttgtttcctctgatgttgggccttttttttttttctttattccctcggactttgtataccgaacttcaaatgtttttccaaattgccatgtacacttgaagcgaccaataaaaggcatgaatatatagtctcgctgacaagcttcaaactcaatccatggacccgataccgaagccacgtaagtgctatttttgggcgttttcaatcaaatgcgacacaactatgtaatgattggtggatagtgttccaagagtccaagagttgaacattgggaatgtgtcgaaaacatggccaataggatgatcatgtatagagaaaacacatcagattccaaatccgaggtatcgaggacttgtaatcttcagaagtctatttgttttttcttctttatatttttttctttcttgttctttctttcatctcccctctcttcatctgtctcgtttcatccgtgtgctagtctgtctagcatcgcaaggcatctacggttcccagctcgcggaggcttcctcctccaccatgcactgacccgctacttacgatccaaactgccttcgcacactacaattccccaatcttcctcaagctttcttctgcatttctattcacaatggggctctccaacgcagccatcattgtcatcgtcctcgtcgcctgtctcggagcaaccgcactgggagcatcgctcttcaagcactacaaacccgccgatggagagaccccgtggagtccaggctacgagcagaaggtctacatggccgaggtacgggctcgaggattcgaaaatctgaggcagatatactggggtggacgagatcttgagtcgcgttgtatgttctaatgatttctcgatctgctcatgtcgctgactttcattgttgattagatctcccagcggggccgagctactatcgtccccacaccacttacactgaagacaccaacacaaaatatacagcgagctcgtaacctctcctctctccttttctcgtcgcttttctcgaactttttacgaattacatggatatttgacggaacgaacacgggtgttacacgggggagaactggcgttacacggggttacatcgagtcacaacaatgatgggttcttctcaggaaacaaacactgagatgcgaatgagtttgcctggtttcacgggactaggcatatgctttgggggagtattctgattcggtcggccatggtggcttggacaattttttgtctcgaaattatggtttttttatggtatgggatggcccttggatctgcccgcgactcatctcgaaattattgccttgcagccgatttgcttgcatttgtatctgatattcacagtattgctctgatcgaatcaaagaaagtctatctttacaagacgaatccattgtgtgatctgaaaatcgctccgagctttggcttggaatatcgcgactaatcggagctttccaaagctatatatcctctcgaatccatggagacatggccagatcagtctcccgctccaatacggggtgaatcgcacagagccacacagtcaggtcaaggaggccccattcgccaatgggcccgctttcttgcgccctatgggattcaccatcgctatggttcatcgtcccccgggaacgttccagatagcggatatggtggacaggatatgattatgtgcggcccttgcggacaggcttcggtcgcgtttcaagcgtttggccaggctgttcaggccggtggttttcggcgtgtggtctttttttccgggggtatcgggcctttagatggttctttgccatcctgaccatctgttatactctccacacacaaccagggagccggaaggagtcacttttcatcatgtctgtgtggtctgtggtctctggtctttccgtacgtacgtaggatgttttgtctcgttctccatagtattttcaccaattccgccttggatttgggaggttaatggattctcttgcctgggatgtgttttccactgccctttcgctgctgctcgtattcgtatgatcatgcagatcctgacattggcgagtcttgggcctagctcacgaatggggaaaacggcaaatcaaaagagcgcgaaacttcccaactcctcggcttgagttcgcgaatctcgccataccatacaatattgggtaggaggggattggggtcaactccacacaacttatggtctgcattataaattatgctgcgcataactcggcttccgaacttccgtaagaagtcggaggaactcttgaccgtttttcggggatccaggtgcattttgtgattgttctatgaagtcatttacatttgagccgacatcagggggtggctatgggtgtccggagaagttgaggctgtgaattgccctgtcgggcgcacggatagaaaaaacgccgagaccgaacatcagaacggctttcggtgcacaaatcctatcgagatgcgtactccgtactccgtattctgtatagggtatggagtagcgaataattggaatgccttcaaaatatcactcgagcttggaacgatctcgcaaagggaattgtagatgcctagcctgtagagtttacggccagatttacactccgtctgtgtctcaaatgtcccaggcagccaagatattcgtctctccagatataaaccagccgtattcgcgctggtttcctgtttcgacggtcccaccctattgcccaggctcgtgcacattgacatggacagcggggaaggccaaggctggctagctacatgtatttatactagaggtttcctttgagtctttgtagctctcaactctcagctctttgcctttttatcatttttcttgcctgtgtttttctggacgttcaatctaaaaacgcaaatatggaatctcccgatactattccaaactatgatagcgatacaacaagcgaagaacggtacgtaagaatgcttcggagaagaaaaaagcatatattctttcgttacactggcaattatgtctaattcaaccccagaccatcgactcaacccgtcaacaccaaaatccaggccaagttccaaatagcccggccgccctcaaaatcaagccaacgacttcgacttagccccaaactactccttcaaattcaacaactacctccaaaccaccgaccagtgcctgtactggagatatggcagccaccattccgcaagtcaaaattgaccaaaggtctccctcaacgcccaaagctcggcacgagagatatctacgcaaccctcaatgagccatatgtcaccaataaacaggcaatgggacaaaaacatcccaaagaagaagatacaaaatcaaataatgtccaagaagaggatatcgtcgctgctatgtgccaaccgtcaagcagcatcagttctacatcctcaattcacttccgcgacacaaaatgcatctggcaatccagtaccaactcggcaggaactgagaaagggactttttacagattcatcattaaagaagaaagcacagccggctctgagcagccccggatgattatgcagtgggagaaacgggcactccctgcaaatggaaatggaaatgcggctccagataatgaacagttcattcttatggcgattgaccgcaagacacgccgaaagagtcgcattgctacgatgaatcggggcgggtttgatattttcataaggaagagttcgatcctggaccatcttcggacttgtatgacgttgacggtgcctgtttctgagagctctacggatttggagacttggttgtacactcttgtgttaactttgggtgtctcggtggcttctcaagaaggatggttgggttgattgttcttcatcgccggtggaaaacatgcatgtaccttagatattatggttacttgcgatacctttatgaaaagcactggggctactgatatttatactggattactgtcataaattgtgttgtagccataaatatacacccatttataggctaagtattgtcgaggccatcgccgaggtcatcgcaagcgcaagtccccatttatcagtaactaccaagtagtcaatccctcttccagcgctttgatctgcaatgccagtagacgcgagtagtatctgctaagagcgagattcccacccataaaccagaatccagggtgaccactccgccgccagatagtccgcatttcaccctctttatcaagtccccagatatcaccaaccctgtcagcaaccttgtcgccaaatatcacgcgagtctcggttctcatattctggtacccagtagcgaacacgatttcatcggcttcgagctctgagccatcctcaaaccggagtccatggggaagaacctggctaatttcctggccatgcttcacctttaccttcccatcgataatgagctggcttccaccgacatcaatatagtaaccgcctccgcgctggaagtacttcattaggagaccgctgtccgagggtccgctgtcaaccttgaagcctgccttttccaatccttgaatggtctttgcatcgttctggtttatgagcttggtgactttgacttgttgcgctttgaacagacgcgatggcatgctccacatatgaagatcggcgtcctcggttggtgggccgcttgcgtcatagagccctttgaaggcaatttccaaagtagattcagacgatatcacacaggtagagcttcgctgcaccatggtcacatcgtaccctttctcgacaaagtcctgggcgatatcgtttgccgagttacaagatccaatgacaatggcctttttcccctttgagtcggcattggcgccaggatgctccgagctgtgacacaaacgatctcccttgaaatcatccattcctttgaaaacaggcatgtttttcttgccagagtggccagtagcttggatgacgtgccgcgggtgcaaagtgcgcgtctcagttccgttttctgtcttgcgctcgagaacaaccgtccatctcttctcgttctcgtcccatgatgaagatttgatctcggtttgggtccaaacattaagctctctgaacttaacgtaggtttcgaagaaatccgctagcttatcctttggtgtatagacgggccagtcggccgggaaaggtaagtagggcatgtggtcgtaccacactggatcgtggagaacgagttggtggtatcgccgacgccagttgtctccgattctttcttctcggtcgacgacgagggtgtcgatctcgagcatcttgagacgcgccgcagcagtcaagccaccctggccagcaccttccctcctcaagtcagatcttatacttctagggaaaagcttcatcgacacataccaatgatcaataccacagggtcctttccctcaaagttaatctcatcaatacgtcgatctctccagttctttcggccttgctgctcgccgtgtcggacaccaaatggtctctccttgttctccttgtagccctttgattcaatcagggaagtgaagacggtgaaaatgtaccagttgccctcatgttccgccaatcttataataccatttccctgtccattttcggtagtgactttgatgtaaaattcgattccgaaaacatcaccaaagaaatcaataggagccttatgtggggatttcaagtcagacgatcggtcgatttcgattttgctgggcggtgcctcggtgacaaaggcagcgatagcttgactgccctcgagggtgtggaagtcccatgaatagcacaagtggtcacgccagtagcaattctcgagaaacagtgatgcaacggcggccttgtctctggctgagaggctcgagttcagctggttgatgattctatctgcaacagtattcgggtctaggggaacatccgactcagactccgacatagtctcagggaattcgccaggttcgatgttgcatgaacctggcacaactcgctcccgcgatggcggtaggtcattggattttgtcatgttgaatttggtgattgttgatttggtttgattcgatttagggtctgacaggaagtacaaagaagaggaatagcccctcacttcttatttcgcctgttgataccccgcatattgattgacaacacatacctagtatgtacagatctgctgaatgcggggctatagcgttttaccccggctatgccattcccggggtccccatctacaaccatctacaacagtctatttacttacttttctagtggcgcagagatctgactaatgttccctggctactgagcccttggtgttaaacttgttattttctttcgatccttctgttgtcgatatataaattccagttgctttaacattggaccaaaaggcctattgtagtacgaaaacctcgacttacattttacggtgggttatcctgatgtgggtacctagataggataaatcaacccttgacgtagtattttttatggttgttggccgtttttgtctatgaggcatgtttgcttgttgtctacagctagtcatttgaaatatatacaacccgagctctttccctggtaggcaatgctatacatcaataaattttctgttcgccaaattgttatttaaagctaccgagtaagtttctatctccgttaagcattgattttccaaagttttcggttttttagctaagaaattagattattgctttggctaacagctacgaattgggaagctttttgataagtatatgatacacagtagtgcagcgtaatatatcaactagcatcattggtctagtggtagaattcgtcgttgccatcgacgaggcccgtgttcgattcacggatgatgcacaaagatttccttttttttttctctttcaattattctgctcttgatcctgattgattgatttttattttgtaaacggcggacctgcgaatctctggtttatcgtatatgctccggggctgcctggcaacatagcaaacagtcaataccaaccagcgcacactacttctcaaccgagaacccccgagagaccgtcgtgagaaaattaccatcatcaagcagggaattggtatcctctacgagaagaaattcattttaattggttctcagtcatgaaagtaatgggctccatctctctggaccccaatgacagatgtctgcggccgcaattacagtcctgtatacaaccgaagcgagcatagacgataacaactagaactcgcattgcaccctacgaactggtgcagcgcccattgtgagcctcccatacagatccgacttccccggcattgactaggccggatggattggctttgatgggacctgatctatcgttgacaaccagtacaactttgcgccagtgccaagctcagcaatgctcgcgatcatcgggtcgtctggatggacagattacgagcaagtcgggtgtggttggccgggcgtcttgcttccaataccttgactaggtatacagccgcgattgacagcaacagcggaaaggccacggctttgaagtcagaggcgcattatggtggtataaaagtaaaaaagtcttatcacctgtcactttttgtgaggtcgctacacggtagagactactgttatcgcttctgatgatgactgaagagtggattggccggtttgtatggaggctatggtggtggtttcaagaacgtccagatgagcagtctggcttgagcgaactgtggtcttaattgatctatgcgacaatcggaacggggccctgtttaaatactatctcaggtccatacaggcccagaactcgacgtgattcacattttggacaatctacccgaggcaatttcccgtttgtagcagagtggagcatgagaagtcttacattcttcaactatttgaacaaatccatatcagatagttcagctatatgaagtattccccttggaattggaatattcaggcttaacactagaaagacagataaatatagactggacagtgcaggaggacaaagcgtatacgactcggaactttgaaacgtctcggaatttcgaaacgtctcaaacggcacatcgcgaaatcctcaaattaaattccattcttcgtacgagacctgagttccttccagccccctccagtgttcggaatgcggggaacctttcgtcactcccttgacaccttcctcccttgatgattttgtcggtcacccacgttgaccatatctttcctgtaccgtttatgtcgatgtgattacaacgtggaatcatcatgagtcgggcccggcgtcatgttctaggcgcttgcctcggggctttcctattgctcctgctctatcgttatcaccgcaacaacgatgcacccaaagtcaccctgaatgttgaaatcaacccgaactatctatggagaaaactaccagtgcgatacccggttgctgaattgcatccactacctgttacactgccccagacgctccccaaggttcaaccggcagactccgaagtctctcgtctcaaaatcgaccgccaaacaaccagacagtcggtcgtgaaagaagcctttgaacgatgttggaagtcatatcagtcacttgcttggggcgcagatgagcttgcgcctctcagcggtggccctaaaaataaattggggggttggagtgctacgataattgacaaccttgacacactgtggattatggggatgcacgatgagttcaaaaaggccgtggctgtggtcacggatatcaagtttgaaaatacacagtcgcctgaaattaatacccatcaagtcaacatccatttactcggaggcctgctagcggcatttgatctcagcgctgatcggaaattgctgaaaaagtccatcgagctgggcgatatgctttacgctgcctttgataccccgaacagaatgcccatcatccattggaatgtgcaaaaagctgctcgccgagaggagcagcttgcagagggaagtgcactcgatccagaaataggctccttcacattggaattcacaaggctgtctcagatcaccggtgacccgaaatactacgacgcggcccaacgcgtcatggaattatttgacaagcaacaagacgccaccaagctcgcaggtatgtggcctgtcagtgtgaatgctagtgaagaacttcttgacgacgatttcttcacattgggcgccgaagcaagctctctgtacatgtcgctacctcgggcatacgctttgctaggaggccaagtacccatgtatcgtaagatgtacgagaatgctacgcgcacggtcgcgggctatactttatttcgaccgatgaaccccgagggcaaggacgtgctcatttctggcactgtccaagtagccatgacagagaatgggaatgaacaaacacacctagagccgcaaatgcagtaccaatcttgttttgcagggggtatgtttgcactaggaggcgctttactcaacatccctacgcaccaagaaaccgcccataggctggtcgatggatgcatctgggctcatcgggtcataccgctggggataatgcctgaagcctttgatgtggttccatgtgcgtcgcaaaagaactgcccatggaacgagtggcactggaagcaggaggtctggaaaaaggcgaacagcctcgaagccgaaccaaatccaaatctcaacgtcgatactttcattaaagaccaccatctacccaagggattcgttgggatcccggatactgcttataacttgcgctcagaagctatcgagagcatgtttactctctaccgcatcagtggtcgcgaggatctactcgatgcagcttgggatatgttccaggcaatgcaaagtgcgacgcagacgaagaatgggaatgcagcgatcgttgctgtcacggatgagggtagtgaactgaccctcaaagactcaatggacagcatttggatgtcgcagacactcaaatatttctatctcatgttcagctctccagacctgattagtttggatgagtttgttttcaatgctggagggcacccactgaaacgtcccgaggcatcatgacaagaagtgcatttgttttctaccaccatccctctttttatttttaattatatggttggaagaactgatgactagaatatctataattgtaccatagtgtttattgtatataaagcaagggttatggttcattaagcccggattctctgttctctttaccaatgaaattgaccgagggaactcagtcagataggcaaattttctatatcgaatatatcaaccatttgtaacttctcacaacgaatatacaggtcgtgagtgtaaatcccatggttcgtcgccctctgcagcccactcctcctgggtcttcattcccttcaaagggatccccgtccgttcggcatactctcggagaacatacaagacgctctcgtccccggaatgtagtgcccaagagtatggcgagtgcccatatttatcgtgggggtttggatcgactcctttaacagtaagcaacagcgcaaccttgtattcatccctgcgaattgccgctaatgccaatggagtaatccctttatcatctctggcattgacatcaacaccggcagcaagaagaatctttatcgatgccatacttccatgtctgacggcaaataacaaagccgtctggtggttattgccgaggatcggccgatctagctcggatttgttcaggacaaccattagcatgatgacgcgcgcacctgcagtttggattgcgtgcatgaggggcgtaaggccgcggtgatccgggctgtttgcattgaaacccggtatggagagcagtagcctgaccgcttcttcatcgtttctgattaccgcctatattagtggcgacatgccctcatgatcgggaatttctggatcaatccctttggcggcgagcagtatcctcattatatcgactcgtttggacatcaccgcctgaatgagtggagtcctgccttggtagatgggctgcggatcgacaccgtcgtgagcgacaagcagccggagagttctcaaactccccgctgtaaccgccagccccaacggtgtgaggccgtagtagcccttgcagttcgggttgacactaggcatagcaagaaggagtctagctatccggtcatgatcgaactcggctgccacatgcagtacggtgtcaccgttgtactttgccatgggattggcacctgcttgcagtgcatttcgacaaacactttctcggttgagtcttgcagcgaagtataaggcatcgctctggggtcgtgccgcatcgaatcgaaaaaggtatggaatgagtagtttgtgtagggtggtccttgttcgagcaagtgcaaatatatcccccgatgattcgagcttatctgctactgctagtagcagttcgttgggtagttcggacagaatcaattcaatttgggtgacgacgaatcgtgccactacgaaaatgggtctttccggatcaccactagttaactgactatgatcaccgccttagtttgggtttaggaggcttggcatacgtctctatccgcagaacacgcgcttctcattggctgtgcacttgctatttgcttttctctcttgctttctgttggaagtcctcgttatcatctataaacaggcatttcaatttgacgaaattcgtgcagcgtaatttaccactagaccataacaaaaatcaaggttcttgtttagggcctagaggggccatatcccattcttgatacaattctatacctgcatggtgtattttgactttttactatgcgaccgcgtctttttgttcgcgtctactccgtacttcgcttttccttcgcgcttacttcgctctcgtacttctatgttttcttttacttcttttatttcatgactcttattgctatcactttataactcttttgcttcatgtcgcctgtggcctatgtaatccttctaattcgcgctgccgccgacggaccgctgcagcattctggctcatcttccacaacagttccttttttatctcctcccggtgtttcccaatttcttcctcggtttctactttcatctgtcaagtatcagtctctatcctcatatggtctgactatatacgtacgaggtatccatcttcagtactaaactcgcaaccaatacagcgtcctggcccgatatattccactttattgaagaggcgtgtgacgtgttttaggatagttttacacccatgacatagaaaggtataatcttggcggcgtggtggtcttggagattcagacgccatgttgtagtattcgataatagagatggggttgaagtgagggtttagacgtgagtatctgcgtgatcatataccgtgtgcatatatatctaccccagggattagagttactccgttccgtgcattgacatgtcatatttcacaacgccgtgccgacccatgttgttgtacgaagtacttatttctcccctgactttccctgccttgctatctatagcagaatatggcagaattctatattgcacccgattggaaggcggtacaggatattcaggcagccgtgaactctgggcgggaagcctcaggtgtctaaacctactgagcccctgattgtaatcacatgccctaaaatatatacaatatgttcgaaagtggtgatatatactatttgatgggcgctgtccacagtaggacttcggcttattagtttaaataggagcttggcatggggtcgatgcattgtggggcagtgacacacagtgacacacagtgacggatattgactcgtgaattcagaaagataaaatgaatgagattggtctgaaatatcagacaccaaacagatattccatgcacatacaacatgaccaccatcgagtccacaaggttgcgaccagccagccagctaacaccgacatcaacacccttgtccatccttgacgcaacagtcgtgcgctttgctccaacaggagcaatctggatttttaaccaatctgcagacctagatcagaagaccctggttgaccgcttgcgaacttccttcattgaaaccctttcaaaattccctcaatgggcaggccaactccaatgggcacccgtcaaccccaaaggagaccacacagaacgtttcaaccgtccattgattgtatacgggactgataccgacccaggtgtcgaatggacagtaattgagcgccccttccgagcagacgaaatcgtccccacagcgggggaacgggcttcatcgaccaccggctctcaacccggagtatgggtaggcgatgacttcgacgaaagacttttcatatcatccaacccactggcattggccaacctgcgcgactatgccggtctgccagggatgcaagtccaaatcactctcctccaggaaggaggctacgtgatcggaatcaaaatggcgcactgtctagcggacgcacagactttaatggtattcgtgcatctatgggcgcataacagcaaaaagcaatttggaaatcagcccgaatctccgctaatgggcgagcccgtgttcgatccgacgttgctggacaactgcgccgcgggcgatattgatagccccgagccagaccaaaccctcgtacacaccgcgcgcaaattgcccttgcatcggtatagctggtgggataccagcgacgagggctacccggcatttttgataccaacgacagagaactccaaacccgcagaaatcgactacaaacaagtctcgccctccgagccagcaccctggggctcgtgggatttctccaaagaagtcaggtacacacagttgcactttacaggtgcggagctaagcaaattccaagccgcagccctcgacacaggcagtcgaggtgacatctctcgactggacgctctactcgcgcacctgtggatagccattacacgagcacgcggacaagccaactcgtcaagacccatatacatggatttgagcctcggcacacggccgcgtgtttcccccgctcttcctgatacgttcatcggatcgccgttgttcctgacccatgttggtggaaccgcttcctcgatatgtcaggaaatattaggcgagacggctagtcggatccgagagaccatgaagcggtttacggctgatgctgtgggtgcgatgttgcatgatgctgcgcacgaggtgtcgccccagcggctgtggcaggggtttttggggcctgagcatacgcttgttacgtcgtggttgcggctgcaggtgtatgaggttgactttgtgggtggggataagccacgttatgtgcacgctgttatgcctaagatggacgggtgtcttcaggtgatggatagtggggttcatgatggcggggtggatgttgcgctctatcttgacgcggtggctacggggcggttgcttgatggtgactgctttcgagtatgaatttcgatgcttttataagtccattctagtggacgaacagcaactattggtttatatccacgtaaccgcgtaaccgggactaccaaaaaaaaaaataaaaggaatcaaaatttatacagaagaattaattataaatgaaaagcaatacctaagcactcattgaaagcgcccgatgccgtgatgtccgtttccgacaatcagcatctcgactcttgcgccccattcggccaagagacatgctctcaagagtctcgggcttaccaccccaaagcttagttctgccattccgtttttgttgtataggtggaatccagaagtgcgtgactgctgcgccgatgatcatgcaggcgctgaaaacaaggagaacaatgccgtgcttgcgggtcgatgcgttacccggccctgcgccgaagtgataatatgctgagaagatttgtacgagaatagaacccagctttccagccccagcgctgataccgtgacaggttgcgcggtatcgggttgggaagatctcggcggggatcatataggttgttgcattggggcctgtgggtagttggttagaatgatttagtgcatcgtaacccaggtttgacttaccaaagttgaacatgatttggccaacgatgtacaatgccaccacagcaggagggtgggagtaaagacagacgaacatggttcccagggcgataaacagagccgctagtgcgaggaacatgtacttttgcagtgccacgcgatccagtttatgggcaaagacaatgagcagtaggccaccgacaaaacttccgatgttgagcacaatcagcccgcgcacagaggtttccatgaacatcgtgtagatatcggcgtctggtgaatcgtctgtcatccagctcggtgccgccgcggagatatgaagctggccccacgtctttgctaagaattgagggctcgacaatccgataccgtagaagccgaaatcaaggaggagccacgcgagagagcaaccagccaagctgcgccagttcccttctgtccagaagtaccgcatgatgtcgctccgtgccaaccgccagtgagagttgagggtagcggggggtaagcgggtgaactcgtcatcatcttcatcgttatcgaaagtcgaacggctagcaatggacgaaatcggaggtagttgaattgcgctaccggcactgcatgtcgcagtgtttccccagcccacagaatcaatcataccgggcgtgtcactgaaaagggtggttgcatcaaactccgccgtgacgggatcgtccacgatatcgactaggtagcgagggctctctgggatggcgaaccggaaaagagtagcgactgcgccgggcacgactccgatggcgatcacccagcgccacattatatcgacagtgcgggtgatgtcttcacccggagtgctattagcacgagccactgcgataacaaccagtgagacgatgttgcctgcaatctgaccgagtggctgcatgaagaagacggtagccatcatgcgggcgcgatgcttggtgggggcaaatctgatatttcaagggtcagtttttccacgattaaagatttcgagatcgatcgacatactcagacgtaatcactgcgctgagtggataatctgcgcctactccaataccgacacagattctccaccaaataagccatgcaaagacgttcatgcttccgtccacgcctgtcgaagacatgaccacacctagggtggctgtaatgaggagtaccaattcaacaccgtacatcttcttgcgcccgttcttgtcggcaagaaatccaaatgccacttgccctagcagggttcccccaagtgttgcgatattgatgcatgtgagtcgtaacgaggaagtgttgtctctccagtatacgtaggagatcatcggtaaagccatgttactggcaaatagctgtatcgagtattagcggttgccgtttatgcgttgcgacaacatttcaatctgctctgaaacagggggctcacgcactgtgtaaccatcgaggaagaacccaagaccggcgaccagcacgacaatccattgaaagccttgcctgtcgatagtctcgtagatctgtcgcatacggacatatcgatcctaaaaccgaactattaggaacctgcatcatgcatgtcatgctgttcggacattccatacctgctcatggtcgaagtccctggcacggtcggttttatacaaccgggcgtggaacttgcccattgtgaatattagaaggttgaaagatggttaaagacttaaagtcctacattttcgcagaagatcagaagatgcttagattatacccggggcttccaaggtttacaaacgaaatacagacggaggcccgtgatccctgcaggcgctaatgcggggctaagctgcgagcaagacaaagctttagggttgttccccccacgtgcggcgtctcttgagcttgacttgtccgtggccaccacgacggatccacatgcaacggccagcccacgaggactcccttgagacatggcgaatttagattagatggttcttgtattattaccaattgagccatttattctaattaatcacttattgttgcattcgattattcatttctttcattatatttcattatattccagacgcaattctagtctcaaaaggtatatgcaacgcccaggggtatcttggtattatgtgatacatatcggcccctctgcccaggaactccaactccatgtaaaatccatagcaattgagggatttatatccgtcctcgtgaacgcttcatccaatcgtcaggtcgtatgacaacatctgacaaaatgctgcgcagtctgggaaagagagaggaataagcgaatagtccgaaatgaaagaaactcaaatgtgcactgaccatcatcgtcaagaaactgaatcgtaagattccgcatttgacacagaatctcgaagttcggattcagatccagtagggctggccgcccggcctttttcgggggtttaattgagccgatacagttcactagtcgggctgttagcaaggtcgctgtggccggatcgaaccgaaactcacggggtatggaaacgtatcgtttgagctccctccgttgcgagttagcgaagaatagcattacacgcttcccattgtgcccgcggaggatgcgaagattttggctgatgcactcttcgccccggcctttagacttggcctcggccatccccccgataaagatcaacttggagcagagcataagttcttgaaaccgtacgcaatctgcgaatgtaagcggatgttcatcctccaaggtttctcggtcgcgtaccatcccaatgatcgaatttatatgatagctgcgtcatgaataccgtgcttcccgtttggaccgtttgctggtccataaaggacacgcgaagagggtaatcgtcgcctgattttggatgctctaggtgggggaccggcagttttgtattggagactatgatttgaatgatcagcatgtttatctttcggagacatgcgacacaactcacagccatggataaaaggtgtttgctggcctaatcctcctccgagttcaagacatctcaatgcgcccgttgagtccttgcaaatatcaatgaatttgtatttcagcttgaatagttggccgtttttgacaaatgaactgcgaacaagtcagcgcattcccaccggagggagccatgttctcgacacaaacatttgcacagaaggagtcagctcgagccgcacgacttcatcgtagaactgccaggattgcttcctcgagctggaccctggggatgtcgcaggactcggaaagaggatactcgttgacgcggacgacacggtggaggcggaatgggagctttggcgtcgatctacccactcctggcaatctcgaggagcaaaagggttcattctctcgttctatacaagggataggtaatgttgaagatacgatcgggcggatcccgtctgaaaaagatcggccaggaacacaagtggcataattgacgatagaattatatgtagaaaaagtaaatatacactcgaacctatgatatccagaaaccgaaaatacgtcggggatgagcgtaacataatgtggagaggggatgtggaacgtgctaaaatggctggctatcagatcacgacgggtcccacttgcatcgtgctttcccatgtggctttgttaaatttcattgggacgttcagctgtttgagcttgaatgatatcagtattacggaggacattatccgagctaccgttggtataattgcatttttacctctattagccaggaccgatgcgcttaaatattcccgaggttactccgtctatatctacaccttggaagctaggctaaatgatccacaaacacccagaatacttctggaactggtctggaaattcttaccgatcagcatcccatggttatagttccgatgcctgcagcttcccgatgcgggtcgcataaactcggctttatagtagagccaaggtgccaatcaatgccgaggctcatgaagtataattgatcttgggcatccagtcacactcttcagaccctgcacaaatcggtactaaaacacgtaatagctctttccgccggagttatagctcgaaactaggctttcaatttccctttttagctctcggacccagtgccatatcgacatgcctcgatcaactatcgttttttagcccaatcagcgggcctagtgtgaagtatgttcgggactcgttagccgcatttgcagacataaatagtcttcagattagtagagctatatttgttattttatactaatatgctcccgcaattagtacacgtcacagagggtatgattgagtaaacctccaatgatagaggcgatttgatacagcatagaaagccacataactaccttggccactaccacgagtgatatttgtaagatactcgtccaatacacactgttagttagagatctgtttgcattgcctaaacagtgatcttcccagggataattgccgacctgactgccattgacaagttacataggaaaagccgcgacctgcagattcgttgttcgaactcgataaccagagaatccgacacgcagtcgtgctaggaccctcgctcagcatcggcccattgttaaatgagctggagcataagatatattagaattggcccatacgaaaatgaactagataaattgaacggaagatggctctgtttgtcagtggagattaatagtcccgcatttttgatttcaggatcgaatctgtccagattggaggtggcatgggaagacgtcacattcctctctacagcgcggagaagagttttgcctaccacttagggttatattgttcgcaactatagtcagactatgttagaaatgaatgttaactactaacgacttatctaagattcatcttacttctctctaaattgtacccgaattgtaaatttggctgtcattatcttgtcttagaagggtcagcttttgtccttcggagctcttagagtcgtctatcagggctgaatgtaacttcactgacttaataatcatagacctctaacttgaatcaattacactagcctgtgatgtaggtgggctacatataaaagcgaacttgacagcaggcatcaacctttccttgtcatcatccatcaagcttctgatccaacacagcatgtatctcaatcgtccaacctatctttggcaacttatttacatctactcgtacagctaacaattttctaacaccccagacatatccttttgacattcaatctacgtcttatctttactccgtcatacacaagacgaaatcccctgaactgatgacaaaatcaagaccaattcacgcaaaaatacacttagcgaagtcaaaatgttcgtccccgacgcagaagatccaggatctagatttcagggcgagccttacttcaacatggctccagtcgctccagctccagctcagttcggtcttgggtacttcggtcctccgtccgttgaccctagtcctgttgcttacggtccttgcaaaccgccgccaatttaccctgttttacttgggccctctcttctatcccaaataatcgaaccctcttctgaatcagcctcccgaatggtggatggctggccggtgtttcatccgcagtttggatattacctcggtcttcgaccaattgacttacagtcatttgtccctgcttcatttccctatctcccttctccctcctatggtgagtgcctttttctctcgctctcaatgccttgccttcctttgaacattacttatactaacctgaactcagcttccttccctggcgaacctgttgagatcccggggaacaaatccggcgagtgccttgctgctcatcgcaaattcatgaactggatccatacggtgtactattcatcaaagtcgcccgaaacctttgtgcaagcatggcaacgagccctcaaagatatgaagcaggcctttggacccccatatcttcccacgatcttcatcctcaatcaattccttgctgcggtcagtgtaaatcctgacaccattccatgggttgagtcgctccactttgagaaaggttctctgccagcatccatactagatgaagccttcgccgatttcttggagtttgaggcataccgactaggaaaccaacagtcgcccttaagtaacctaggtactgacgtcgctaacgtgtatcaaattgaaaatctcgccaagcattactgtccctttcacctgcgtctcacaatgcatcccattgaggaatgttttcgaaacccacagaacacgaagcgtaggagaaagtggaggcggaagcaggcacggatggcagcagctcttgaggccgaaaatggaggcggctatgattgacatgttctgttggagaggttaccggccatcaggtgagatttaatttctagtgtccttgtcgtgaagaggctacggctctttgttttaatgagtgggatctgtgttcagtcttttattctttcatttctcatgtccactgttgacattttcctaccaagatgccctctccttccgttgcagatgttttgaacatcaccaactttcacacccatgaatgcctgaaggatcggctacagcagccagattaattacttcttgcacctttccctttttcttttctgtcatttactttgcaattgatttatgaaaattttctccattccaaaattgctattttatctctggtgtagtttgcatcatcctatccaccatgcctgctataatatgtatgcgctgttctatatatcctactcttaacatagcttttaccatccatctcttcggttcactatattccttccgtgtatttcatcattgtctgtctaccatctattcctcacgttatcatatttcttctatcatctctccctgtcctattcttctaagatttctcctcccttcaccatttatacatatctgttcacgtcttatccccctttgttgatagagctatagaacgagaatgcttccatcaattggtaagatggccgagttggtctaaggcgccaggttaaggtttaccttgactccacaactagtaatagtttcctggtctcgcaagaggcgtgggttcaaatcccactcttatcataactttttgctttttgttcatatcgattgctttttgatctagttggtgaagttttatagtcaaaatttgtgtggtttggtcggttagttcggttaagaaattttctttattgtgcgtctagtatgatacgtcggcaatataaaaccaaacttacttattaagatggcatattaattcagctataggaaagctaactgcatcttatatgttagatctagaagaaaaatctctagaacaacaactgtatactatctcgggtatgacacttgcatggcatattgtgaaagactaagtcaatataaatcgttcaatcttaattgcttagggtagtcctttccatacatttttgcttcttagatacataaggtgtaataaggtcaggtgaacactttcagaaatgacagggatttccgtcaatacaagtcccttaagctggaccagatactagcttacctgatccagtaggtttggataagtccttagcgacacctcgaaaatgtggagctagatttttgggcattaagaaggtagatagaactagcctgcatgttgatctaggttataaatgagggatacatcgatgaaaacgtgtcttgtttcgttaaaccttcgagcacctagaacatagaccgtattcgataacgaagaaatccagaaagctgagagaaaatgtattcctaggcgtagaaagaagaacatgtcccatcatcccgcaatcaagttgcagcgaccgtagattatgggattgagaaagaagaacagtcacaaatgcatatatgtcacctgttccgacatagatccacttctctgacagggaaactgtctctgtgatatctttcacagcggttacctaatccggtaatacaactgactgtcactagaaatgagagctaatcgagtctccatctatttgacatctactcgtcttcctgatccgctgctggatacagtaatttcgaggagatcatgctcacgtggtggacgttcgtgaatgacacgccatggcccgcttgaggggagcgggtctgtcaatatcgacttggcaatataatgagctctccggggagtgaatttcctcattttgatctggtgaaagtgtgtaagaagatgttccaggaatggcgaatagttgacagaatcatattcatgcaaatcaaacaataggatcattagaaagtacagatatattctggttttttctgcagagttggggacccggggcgaagacgtcacttggcccctgcagatctgaggatattgtgggcgaaataccgctatccatggattttaccactttatgccacgatttgatgaattaaaagagggataatcaataatgggagacttaaatcgtactttacataacaataaccaatgtgattgtgttcaaaggccctctaggaaggcttatatgcatctcaacccaaccacccggatgtcggatacgaacttaacaccgcgatctaaatataggaagcagaaaaaactggggataattggaaagcacgacagtcaatcaattacaacagcccatcccatgtgtatgattcaacgatcgctaccaaatgtatcatcccaccttgaatatactaattttggcccgtttgtcctgtaagatttgctctactcagccttgggttgaggctgaacaaacagtctgacctcatctatctgcgttggagactagtctattcctggagtcgtatataaagaccagctaactaatgatttgatgcgctatgttttacgaagtagacgctgatctctcgtcaccactttggcttaagaaatatcatgggcccgtgtgagacagccagtacaccgcatgtcctcaacccttaaaacatcaccaataatatagaggactggtttgaaatcaagtctgaatgcgttgacatcaagtgagacccagtcaggttgcttatttcaatacctatgcaagggagatttccagtttagtttcccgattgaccttagcgtcaggctgtccgtggcttccgtgaactaactatgggatatatttgaaacttgcacagactcggccaatcaacgtctttgatacttttagaattccaggggtggctactcgggctggcccttcacccagattccgagcacataaataccccagaatcatcgcattttctacagtaactctccatacaatagaacatcttataccatctgatcatcttaccagcaaattctatatctccttcaaaatgaagtccttcttctccgttactctcttcatcgccgcggccattgctcagagtgccaccatcggactccccactgagaaccaggagatcaatcccggcacggaagtcgtcgtccaagtgcagcgtcctgtaagttccagagtgacctcatcacagaaatccgttttactaattgatcatccagaactctctaagtgggtccacggaggtgggcatagcgatcggcctctcctcgtgtgcatccgcaccttgcaggagcgcagaggatattcttggaacaattctatacaacgggcctttcagccccgtgtaccacgagaccaacctgcccccgtatgagaacttcacgatcaccgtgccggcttcggctaccgttggcaaaagccagattaatgtcgcccatgcggctctgattggtgtaagtagatctcctacattcaaaggaattcaagcatgctaattgaattgcaggccggtccttccgcgttcttggagtctttcaaccagactgtcttcgttgtctagattggtgccagcttcgtacatatgtcttttcattcttgttgtaaatcgcattttgttgtgaatatgccttgagtggatttgttgatatatttgaatacagttcagtttcgcaaataaatttggttatacatctatacctccaacaatacgctcgaatgaaagatatgaaccgttctttaatgtacaggagaatatgagcagcagacgcctttgaaagtggcgttgcccgggtctcgagggtttctttgtttaggaccaaccatttttcattagtctttcctattgaactcttcattcggacatagcctctattcaatactcaacctataactggtttgattcttctgagtcttattgatacctggaccgggccatctataaaatccgcctgttcatctactctttgtcccgattctgacatgaataagactacaacaagtctcaataaacatcatgtgcaccactgggattctccctcggaaatgagagctttctcttgtcttcgatcccacggaaaatccgcacatcgtcactcgttaattctgtcatgatggacaaggtcttctctcgcgactacaaccccatccccaaagcagatgccgatggggacagcgatgtcaccatcacgaacagaccgccccgccggggcctacaacaatttttgaaacgaaacctcgccgcaataaccataaccggcctgctgatggtcctgttactcctggtgatcgccgtaatcacagccatcgccgtggaacccttccgcaaggtcattgtcctaaaacggccaccctctgactcgctcgcataccccgaatcactcgaaggccagcgacagtgcctgccaccagctccacgagtacgatactcatgcggcaactcaaccaaggaggccgaagcgctcggctgtgcctacgaccctcttgctggctgctggctgcacaaagaatgtccgcatgacttcacgcacgagtttgcgcatttcaacaatggaaagccctttgtatatttctatgacgaggctgccacacagcaaatgaaggattacaccgaactcggcaataacccggacttctactggactgctgtccgtgagcatctggtccattgtctgtatctccttcgtcgaggccacgatgtccacatgcgtgggggtcgtctggacaatatgcttggggatctagagcatgtcgatcattgtaccaacatgttggctaattggctgcggagaccggatcccgctttggaggagataggcacgcagggccagactcattgcttcatgtcctgtgcttgattattgggtatatatatagtcatggatcatgggatcaaataagacggatataggcgccagtaatcccgtgtcttggacagatggtgttgaactttgtattgttttactaaaagtccagaatgacagtggctttccagtgtttcccactattatgttatatatcttgatccaaaaagaagaaacagacatagtctattctgatttattccaacaatacttgaaggtaaaaataaatataggaaattcaagctttccgggtatctaatctccgacttgacttccgttatgtccgcaaccgtgaaaataggcctccacgaaattataggctcctacgaaactataggctccaacttcttttataacaatcatccaactcgcacctatctcccagaagctcctattcacatactcaaaatgcctcccaaacgtgtcgcgatagtcaccagcagcacccgcagcccccggctcaaccccacgataacgcagtacgtctatgacgtcctcatctccgacccgacaatcccaacaaaccacagcaaagcaaccgacacagacccgcgccacataaccttcgaaatcctcgacctggcaaagcagtcgctacccctctacgacgaatccgtcatccccgccggcctgcccgccgaagaccccaccccgcactacagcaaagcgcacacgcgggcgtggtccgcggtggtgcgccagtacgatgcttttatcttcgtcacgccgcagtataactggagtatccctgcgagtctgaagaacgcgctcgattatctctacttcgagtggaaggggaagccggcggggattgtttcgtatggagggcggggtggtgggaaggcggcggatcacctgcgtggtatcttgaccggcttgcacatgagggtggttggcacggcgcctgcattgccggtcaagtttactgggtttcctgttgggacgttgtcggaggaggaagagaaggtggagctagatgagagggatcttgttggatggagggaagctggggttgaggggatgatgcgaaacttgggaatggaattggtttgtgagttggataaggagtgatctagtcttcagcagatagcatggcaggttcttcctggtccgatgtgatggaacttatgatttagtgaaagaaatcgacctagtacgagtacgtatactccttaatagtagatttagcaatacactcggcgctccgcaagttattgagagactaaacggtagtatacggatttataaacctagaattccccttgaagttactattactaatagcgaacgcctcgatacagccggttacgcttccctccttattaagataggagactagaccggccggataaaggcgtagattcttaattcagagtacgacctcatcctcggccttgacttcgagatatcgaccttggagtctcgaccacgcatgaacctcgcagtgtagtcagataaatctcaaatatgaatgcccatggggtctgcaccactggccagaagcatccgaactttttccggtgaattaacgcgaatagcagccgtgagtggagattcgtaggtgcccatattgctcccactgacgttggcattgggagaacaccccgctagttcacgaagtgttctcttgtggtaatccaaaagagcatggaggacggctggattggagttaccagcagccctaatggccgcagactcctcaatgccccaggctacatcttctctggtgagtttatatggcatggtatggttgtgatccttaccttcttactactttggtccagtaggcaatgaaaccttctatgatcaattatgtgaggaaaaagtaagtcaacaagacaacacaaaacagtccaaaggcggtctgcacaccataatctttagcaaagtcctgcaaacgaatgcacccatgagtgagagaagatatagaactattcaccgcccacttttgcttcgggatatctatagtccgtgatcgtcaccaaccctttgattgctcttgccttgaagccactggggaaatataaatacctggtcctccccccagattggttctcttttttctttcttcttcatcctagtgcaagggctttacacgtatcagtgaggagacatccgagatcgtgtttttgctagttgaaaactaccaccttgactgcttcaagtgagcctcgcggcttgcttgggaatttttgaaacatacttactctacctcaactccttgactcttgagtcctcgagttgaattcctttgaatttgatgccatgatagatatttggactcagtcttgagttctgagtgtgcgatcacatgccatcacattaagatctttgttttgtttgctcgtttgcttgctcgcttcccgtttgcattgtttactagtttgctttcattgattgtttgtcaggtatctcagcgagaggtttggggtttgcaacgtttgtaaagtgagctgtatcaacaggctgcttcccactttgcacctgcttctttccctctccatcttagtttctgaattgattgcactctttcctacttgagaagacctagcatgtcacagtcttcacgtagagcttggtatttgcataggtagttgccataactaccggtttatttcacatgatccttccttccttctttccctatctatactccgtcccttccctcctcatctgataggtactgaattcgaaggatagtatgtattaaagtcacattagatgtgcctttgtaaggtatgtaactagaatgtatggagattatgtacttttggatcgtcaatcatctcagtcagtactgagaatgtcctcgcgcgtgataccactgcgttcacacatggcccggaagatgccatctgccttatcccacagcgcaactggtgcatccatctcagcgatccgacccttatccataacgcagatgcgatcgtagtggatgatcgtgcgcaagcgatgcgcaatacacagcaaagtcttcccctcgaagccctgagccatagtgtactggatcttctgatcggtctcgaagtccacggaagaggtcgcttcgtcgcagacgatgatacgtgcgtcgcggaccagtgcccgggccagcgccatcaattgccgctggcctagggaaaagttcagaccttcgtcgtcgacaggtgattcgagagtgagtttgtttgtcgggcgcgctttcacgtcactgtctgtgactggggttgtagttccgctggctagcccacttggcagtttctcgtcttcggattcttgctcttgttcgatgaggtacgccttgcgcagcgcggaccatagttcgaggtcatcgtgctcgttgaacggatcaaggttcgagcggatcgtgcccttgaataaggctgggtcttgggggatgatggcaaggcgggatcgaaggtcgtggaggccgacggtggaaatgtcgatgccgtcaattttgacgctacctcctgatagttcagttaaacggaatagtgcggacatgatactcgatttgccggcaccggtgcgaccgacaataccaatgcgctcgcctccccgcacatccatggtgaggccctgcaggacgagtggaagctcagcccggtagcgcatctccacgctgttgaactcgatgtggcccttgtcaggccagctggctggcacctcggcctgatgcaaaggcgcctcctcttccaattcagtaccgtagaagtgaacccgctctgtggcgttcatgttgttctcaacctcggccaactgacggactgtgaattgaagcatctgtgcgatagccaagatataagacagcaccaacccagaaatgctgggggacacgttgaaccgagaagtgacgaccagaacaccgaccacgaagaccaatacggtcgccacagcatcgagtcggacactaagccaacgttgattggagaaagtgaggaaataggccccgttcatcacatcgatcgagtctcggatggtgcggcggaattggttctctacgccatatgctcgaatgcacgcgattccggtgatggcttcgccgaacttggcatacaccattgagcgcaagacgctctcgtggcgcttcatctcgcgggcggatgctctgtaatagttcgaagctagaaggaacagtatgaatagcgggacaagtgcgatgacgaactaaaggagttagcaaagatcaaaataccaagaaaattccaagagagagggtactcacataatagaagaacactatgaccaagaccatcacggagataatcatagtcatggtcagggcatagatacgcatcgcatcggaaagttcattgtccatcacctgaatatccttcgagaagcggttggtgattcgtccaagtggtgtagtatcgaagaaagccataggcgcgcggagaacacgagacatcgcacgctgaagcatagtcttgctagcattagtaccgcatgtggtcatataagtcgagaaactgaacatcaagacgacaacactgccacccagtccagcgtagattccaatgtattggccggtcgagagccccgggtacttgtcggaagtccaataggacagccacaaactagtccagatgttggcgacattggtaaggccgagcaagatgaataccatgatagcattgaaataactaccggaggctcgaatatatgccttccagacactccagccgacggatgcggtggccttctcttcttgctgcatcagagctgcggcgggttttgctggggccttcttcaaacttggctccttttcgtctatttcatccacgacttcgcccacagcctctacctcttcctcttgcatatcctcctgtcgagaactagacatcaaccgcttgaagacctcgttgtcacgcatgaggttgtcgaatgtatcgaccgcactgatccgtccctcgtccataacgataattcgatcacatcgactgagaacatggagttgatgtgtcgccaagattcggcagcgatctttgagcaaaccacagattgccttgtccatgatgtgacgaccgacgtgtgcatcgacagctgacaaaggatcatccatgagcaccagctccgcatcgaaatatatggcccgggcgatattcaatcgctgtttctgtccaccagacaccgtgatacctcgttctccaatctcggtctggtctccattcggtaggatctcgagatctggggtcagagcgcatgcctcgatcacttgctcataccaagtctcattatactccttcccaaacaggatattgttgcgcacggaggtgttttggatccaggcgtactgaggacagaatgcgcgtgtggtgctcaggcgtacagtaccatcagtcacacgcatatctcccgctagagccgagagcaatgaactcttgccacagccgactgttccaattacggccaacagttcatgtcggccaacttcaaaggtcatatctttgagtttgaatggctctgtgggagtttcatcggtgttatcgtctttgggtgttgagtttcctgatggttcagggcgtgcagctgccttcttcttggctttgtctgcatccttttcgtctgttgggaggcgctcccaggtgaatgaagcatgttccatttcgattgcattctccatgttctcgtcccgctcaatatcttcattttgttcttcggcgagcaggaactcctggattcgactaaaagcagttgaagcatcagtcacttgaccgataaccattggaagcatgttcaacggcatccgcagggaattgaacaacgccaatgaggagaaaaccagtgcggcgttcaagtcatgatgtgatagtgcataggtaacgaaagacagcatggaggcaaaaacaggaatcgacatcgccacacaaagaatgccgtttcggatcgcaagcaaggtctggatggatcgaatttctcgtccgcgaatctctttcaaacggccgaggaaactgctctcccaaccgaagtatttcacgaagcgcacagcttgcaggatttcttgggtgagagatacacgctgatctgtaatcttgttgatactccgtcgtcggctgatcaaggatcgcacggcgaaagtcaaaaatggcattccgattaccagcaatgcgtacccagacaagcaactgtagccaatgttgaccaagagaaggatgagtgtcactataatcgagatgggtgctgcccaaatcatatggaacatgccacaagccaggttaatacggtccacgtcaatactcatgagagcagtgatgcgaccattgttccatccgcggccatcacctgccacaccaccaggtccaggtagcgcagtatctggcttatgctgtttccctttctcttcgggatttgagagagcctccttggttgcgtccagggctttgacttcttctggtgtagcttgccctcctgccttggcacgaccagacaatttcatagccttgttgaagatgtgggagatcagcactgcgcgaatctgcccaccgacaacttgaccccgatacaggaactggttcgtgcataaactctgcattgactgcatacaggtgataccaaccacgaaccccatacccctgccgatgtaaggctccgggagaccagccttttctgcgacataagcctccgtcgcgaaagcaatgaggtaccgagtcaaatacggcgcaaagaccaacaacagcgaactgagaagctgacagatgccgccgagcagaaattcaaatctgaacgtgtcgtacaatgcccagagaagcgggcggttgacgccactctcagtgcgcttttccaatgcggcgtctaatcggctggacaatacgtcaacggcccgatcgggattgacagtccagatatcctgcaattcgagtggacgtagatagcccactttcatcaacggggacatccattggaaggagataatactgaaaaacgaagcgccatgttctcgcgacacagatcgctctgttgggacgggtggtgtcttttgcaatcgaagtggattgagtctgcgataccattttttctttggcgtaggctgcacgtccgcttcgtcgggtgctgatcttaaggcatcggcccggagcttttcatccgccaccactacttcacgcagcggttcgggtgcggacatgctggatgttgaccggatactgaatctgattcccagctaggcagtgttccggagattcgattataaaagaaacggtgtgagtaatccaatcgatgtgggggtagccacgagctgctgaatgcggaaggcggagataatgtccggggataaagaattggggattgggaggaattgaggacattcaatgagattgaaggagatttcaggggctttaatggtttatagataacttatggcaaagtgaccggatgtcatgaaagggctcggacttccgtgtctgacttttttatgactccgtcaaacagggctaagcttccccagatcgggcttggtgggcttgtcatggcaaatgagagttaaaccggagataagtcagaggagaacatgcattcgcattcgtttagaacttcatcatccatcatctagtctcgtgggcagtcggcatcgcgggcttcgggactccgagtgccgacatttggattagtaatgtttaaataggcccacggaatggggaggatattggctgaagtcaagcagactactgtattcaaacctcaaattgttatggtctactccgtattctttgtgataacatacaaattttggcccccgaaaaaaaaaaaaaaacaattccatcgtcacgtcgtgggataacaagcagatccaagacagtaagaaatgtgctaggaagcttgtcaccaatgagactctccagtcgccatccctagcccagaggatatgatatgcatagtttacagatcatgagccctccaggaggcttctgtggttgtcgctgcgatctgtggacctgtgaaggttccgttctttacaaatgtatctagccatcaagctcaatcttgaccttcttctccgaaggtgggataattttgtcctcggaggcgcccttgaggttgggaagttctgtcacggcttccttgatgattccaagggccttttggatctcctcctcagtgatgacaagcggaggagcaaggcggatgatgttctggtgggtaggtttggcctggagaataagagttagcgatatccaaaccaatcctaacgagtagggactcgaatacataccaacaagcccttctccttcatcaacatgcacagatcccaagcggtatggccattggtcttcgactcatcaatgacgatggcattgagcaggccctttccacgcactgtctggatgaccgggctcttgatagccactagcccatctcggaataagtggccgagcttctccgcacgctcgaccatgttctcctcgcgcacgacctcaagcgcgcgaatagcaacggcacagccgagtgggtttccgccgtaagtcgaaccatgggtaccagcctcgaccgtgagcatgacgtccttgctacccagcacgcacgaaaccgggtacataccacccgagatggccttgccgagcaagacaaggtcaggcttgattccgctccactcgtagcacaacagcttacccgtgcgtgcgataccggtttggatctcgtcgcagatcagcagcgcattgtacttgtcgcagagtgcccgggcctcctgcaggtagtctgggtcggggacaacgatgcctgcttcaccctggataggttcaatcaggaaagcagcgaggttggggccggccgcctcgaacgcctcgcgtagagccgccttgtcattgtaggcgattggtttatttgtccctgggatggtgcatccgataccaggaagataagggccatagttctcgcgtgactcggggtcggaagatagggaaatggcggcgaactaatgcaaggggtataatcagccactgatgtacctttacgggtgtaacaaggaggggtcacaattcacttactgtacgcccatggaagttgttctccgcgctcaagataacggcttgattttccggaatgcccttggtcttgtatccccatttgcgggcaattttaatagctgtctcgacggcctcggcgccggtgttcatgggcatcaccatctcaaagccaaagtagctagtgatgaacttggcgaagcgagggaaaacgtcattgtagaatgcacgggagctcaaggttactcgcgaggcttggtctaccaatgcagcaatcaacttggggtggcagtggccttgattcacagcggagtaggcggagaggaagtcaaggtagtgacggccttcagggtcccagaccgaagtaccctgagcccgggcgaagacaacaggaagtgggtggtagttatgggcagcatattccttctcggactcgatagcctcaacagaagaggcagcatggtagtgggagaaaggcccgttggtagccatggtggatggtggatggtggattgcggggagagctaggaagttgggggaagttggaggatcggcaatggggtaaagaagaaaagaagaggaggaaagttgaggaaattgaagaaattccagagtaaaagaaacggaagacgagaagttatataggtaaaggaaaatcaaaccctttatacgctattccgttaagtgttaggcttgatagagcggatgtccgctaagtacaggtcgtgccgacgctgttccctatgcgcaggattaacctacacgggctccagtggctttgataaccacgatttccgattcgttgattggctatattggctctaataatgttccaagtattaatttgtctaatttaaatcggaaaaaaagagagaaaaactgggggtagaaattcacgtcatacttcggctatcgaaggagacaaatacatatacatgaaccttggagatatatagagaaataaagggctagttatgctccaagatctattataagccaaaatataaaaatagacaatgaatcgaaatgttagggcaattcgatcgctccgtactccgcagagtattttgaatctcggagtcggggcgctcccgccctctctcctttattgaccgtgtttgtgcatgcgctttgtgaggtcagactatcttgagccgcaatgtacgaggggatgaatgagtacctacaatattcttacccttgatcatgtctacaccaacttctccgcgccgcaagcctcaaccccgccgcgcgcccactcaaaacatactcctcttcctcatcgccttccgtctcgtcaatgcgttcgcagttcggacctttttccagccagatgaatactttcagtcactagagccagcgtggcagatcgcgttcggtcagggtcaaggggcctgggtgacatgggtgagtgaatgcgatcgcgcccacacatgactttggctaatatcgctcctaggaatggcggcaccaactccgatcctcactacatcctctcttcttcgccgctctctataaagtcgccgatttccttgccttcaccctcagtttgtctcccgccacacgtgcagagctcctaattgccgctccaaagacagcgcaggccgttgtggcagcaattggtgatttctacacatggaagctcgcagttcgtgtctatggagatgattctcttgaatcatggacaacggtatgtgattaagtatcgggtgttcataattcctctcggcagcaaagagcgcatgctaataaacgttcacagctggtcgcaactgtcgtaaatccctggcaatggttctgctcaactaggacactatccaacagtttcgaaacaacaattaccattgtcgcgttggaactatggccatggcaatggtcggtaggctctaccgccagcaatggccgcgacaaaaatactggcaatcaaatggacagggatcgaggtgtgattctgaggtatgactgaacctccaacttatgacaactgccactgacaatacctacagtctccacgaatgtctgccgctggcagcactcgcctgtatactgcgaccgaccaacattctcgtttgggcaaccctggccggcctcgcttggcttcggacctcttggccccagcgcaagatcctccttcttgaagttatgatttgcgggtaagtaatccaatctcctgataaaggacaagctgaccttttgatctggcaggtcgactattcttgcggtatcttccgttgcggaccgtctcttctatggaatttggaccttcccgccgctcaggttcctatacttcaacatcgcgcaatcactagctatcttctatggcagcaatgattggcattactatatctctcagggttatccccttctactgaccactctgttgcccttcgcgcttactggtctatatcgaaccttgtcaactcgggcttccacagtgggagacagattgcaggcggcgatccgagtgcaattggcgacagtatgccttctgatgccatttgtgctctctttgatctctcataaggaagtgcgcttcatctacccattgttgccctgcctgcatatattagctgcaccgcctttaatgcacttcttctacccagctatcgactcgcaggcatggggtcatactctccgcaggttgattctcataatcctcatgtgtgcaaacgtggtcattgcactttacacaactctctatcatgcatcaggaacacttagtgttctctcctatctccgtcatcagcacgaagcacactcggtaccaacaacaaaagcccaaacaaactcagtctccgaaaccggaatctctgttggatttttaatgccctgccacagcacaccctggcgctctcatttagtctacccgacaatcaacgcttgggccctttcgtgcgagccaccgatcgatctcaacgcaactcagaaagccgtttatcgagacgaagcagatcaattctacgatgacacattccaatttctacgccagaacatgactggtggtctccgtcaccttcctcgacgaccgagctacgcctcgcccgcgcattattctgtatcgggaaagaaccccaacgagaccccacaacatgaatggccggactacctcatcttcttcgcccagctcgagccaaccctctacaccatactgcgtacctcgtcctatggggagtgctggcgcacctacaacagtgactggcacgacgactggcgccgtcgcggcgacatcgtagtctggtgcctggacacagtagagcaggactcctggcgctcctttgcgcaacgccaagaacaggaaagccgagagaagcaattcgatcgtatcgtggaagcattcaagagtgaggggcgcaagcaaaaaaagcggggatggatgtcctcgatgccttgggcccctgcgcctcctccattgtttgcgtcgtggcgacattcattggggtcgtttttctcttcgccttcaaaatcatcaacctcttggccttggcgtgccccttctcgttgggagactgttgtatcgaggctgtcattctcgaagcagaagacaggttggcttccttcctgggtgtcgagttggcttcctgggttgccgtcttggttgggcggagctaaaaggagacctacggaggcagagttgtggtcttgagatcaccccctcttggtctccagctattttgcattatatgtgatgctgcgaggattttcctttccccttcagcttcataccattcacattccctttctctttctctttggtctcttctttcttctttggacatatagccccagactagatcttcagtacgatattctgtcttagttcactagcaatacaggtattaattcgaaatttatatgtaaaacaaaatacaacatttatgtactctttgactcgctaaccggaaaccaaaggaatttttagtgtacaataagaaaatgacagcagggaatgacaagaaaagaaaacagatgaaaatttaatgagtggcaaacagacaatgataatgcgccggacatgcacagacataacacgtctcgtcaaacttctatatccagatcagtatacaagtcaaattgaaaatcaaaaccaaaccaatgtccatacctatgtatttacattgctcggccatctatctgtgtatgatcgaaaatcgaattcatagaactcaaccatagcgagcactcagactagcaaaggcatcggggctatggcgaccattctgcaccccattcacatcgacgctcggctgactcatgtgtgtccgaggatatgccgagttcgcgggtggggggcctgaaaagggggactggcctccagcaaatggagtactgtttgctcctacaaaggagggggcgctcattcctgagaatggggagttgttcgttcccatggctggagtggttccggaagcagctcccatcccgggttgaccattcatgccgccaattcctagccctgagggttgctgctgagatgggttgatacctgcttgtgcggcaaggccggatccgctgcctgtggaggtggtgccaaagaatgggttgttggatgtatcaggctgggactggaaattttgctggggctggagttggttctgattctggtgctggaagtttgtggcttgttgggtctgaggcatggagttgtatgggtttgatggttgagagtatgggttcatcgtgggggcttggggttggtactgttgaggttgttgaggttgttggtgttgctggggttgctgagtctgctgagcttgctcggggatggatgtcatattagactgtgtaggacccatattgtacattgaaagaatgttgtttctgtccattccagtgggttgagccatagattgctgggcctgctggggttgcaggtgggactggaattggctggggtagccgcctgcgccctgtggtgtgttgggcgccgcttgctggaacgggttgtgagctcccagtccatttgatggctgcagctgttgttgctgctgctgctgtacttggagagaagcattcggtccaaatggcgaggcggaagacatgaccggcatagtatttgcatggcgaggcggttgaaagccacctgggttcattacgagcggattcatttgttgctgttgcggctgcatttgttggttttgaggcgcagtgttgaagaaagggttcgtttgcggtgcattagggttggggtatgtctgattagccaagccaccttgcggctgcggcggtgcctggtcgaatggattgtagctattgtccattggctgaggcgaggtaacatagggagaccgcgagaatgtcgctgtgaccggaggcgtatagggcccctgatatggagagtgctgcatggagcttgtctgattcggatatccaccagtagagtgagggaacaatggctgggaaacctgcaggccctggaaaggctgtgtagatgccgggttcgagttgagttgatcgaatgggttgtacggagtagtctgtggttgaggggtttgcgacttggccacaggatttgagacagcccgatcaaatgggttgttagaagcctcagggaatgtgttgtcggttgtgacggggaatgggtttttggacgtctcaaacttcgagacgcgtgcggatgcagcactgcttgtcccggccggggtcctggctcttgatgtaggggtgcccccctcacccaacctttcaagtgtttcgaccgctcgatccagatcctcatgcagtcccttgagaaccatctcgtttcgtcggtcattggtgaatcccatctgctgcaacgccgccattttggcctcaaaggatgccgttgttacatcagcgacaggcgcaccaagtcctgttgtcctcctggatggcaatggtggtggtgaccaggtttcatcgtccgagtttggcgaagtcaccttgggcttgccaccaaatcggcggaggttcgaggtagaggatgacgagcgtagaccaaacttgaaaaaccttcctggcttgggcggaagcggaggaggagaaccttcaggagatatgtcatagtccctccttcttggctgcacgggggactgggccctttggctggagtaactcgagtcctccctgctcgggggctttggcttcccattttccaaggaatggtgttgatatttctgccggataaaccgttccatgcacgcatcgtcctcgtccacgtcggtgggaactggcggcttgatgccgcgcgggttgttcaattggttcataatggtgttaccatgcgctttcatgttctgacaaagtccactttgtcagctcgtgacctttgctattgcggggttccagattgtgctcacatcaatttggtctgctgtccatgtgtccatgctcaaagatttaaccttggaaatatgtgtgcccagctttcggtgcagtgtggcgcaacgcatgcaaaggaagatgccaatctatcggagacaagcagtcagtttgtgaattcgctcggaggtaaaggaagcggtgacatacgttccaactagcccatcctattcaaataacaattagcgagatcaacaataaaagtctctggggacgaacctgggttccaggcaccgcaatcggcacatcggtcattgccaggaatggtccggatcagctcccccagggttctttcatgccgcgcctgctcgcgcttgctgataccgggagtcatgatgcagaaaaataattacaagaacaaataaacagaaggagtggcagtaatacaaagtggaataggggaagatttctggttcccagggcggagaagggtctcaattgacgtccgaggggcagatcattccaaatgagacatatatgtaccctgcggagcatacggaggcccagggggtaaagaaatagcagagtagagagaaaagaaagatttagacattttagctcagttgttccaaggttgagttgattaagttagattgagttgacaatcccattctcaatttctttttttccggcatagctttctgcataggcccgatcttctagaacactttaaatgcttctgtactgcagagactcgagcccaggctcatacgttcggaaggataagaagtcacggaatagatatatattattgatactagcgagaagaaaaattggcatgtctggacagcaatgactcgcatctaccaatgcgcctaaaggccgaagccttttcggagccgtcgagaagtcgtaatgatatccaggaatatcttctagtacgccaatatgaccaaccatcctatgatagaggaattggcggttgattatgcgttcgtaaagtgtaaagaaggaaagtctccaatttgcgcggaaattttcgatacaaaagggcacggtcacgtggctgtactagctcgatcacgtgtcctggagattgagataaaaacttttcacctcacagcttgtcttcctctttaaccatcattcgtgtgttgaagactcgagactccaatcctttaatgtcggggattgtcgaggacttggatccaacattcggatgtaaacttcaaaccacataacccgcgcggtgcctacctgtggcactgttcgtctcttgggtgattttataatcgttcgttcgtggaatatcaaaaccaaacagtttttagcagagctgcgtctactccaccctggtgttcatatctattgaacagcaggacttttttacgacggacatccccgatcataatggaaatatattttcaaattcactcttgcgtctatcatatcgtattacttgtcatggatcattgatcatcgtacttattttcaaggttcctcccgagggcatgtacggggacttacgagtaccaacaatagcatttgcctatatcacatgaccacccatactcggctgaactgattttccgtggaatagcatgcgaacgacagctgtagcagtgtttactcccatatgtagatctttcttctagcgcataagcaatggatttcgtcaatcttgccgtacagcaatctgatcggattttctaggtgtggattcaaaatctgctcggaaattcacccatggaattggcaggcaagcttgcttctcgacattgcgatggtaaacctttaacagcttcgcgccttatgaatggtgcattcaatatatgttaccgagtcgcctttgcaaatggctatcgcgttgtggttcgctttactgccctcggtcgggtctctaatattccccacaacatctccagccgcgaacgttttgacaatgcagcagactatttcgagaagcttgctcgtcaccagctctaccatcttagactacaacgcaatgatacaattacaaatgaggccgactgccgcaagaagtatatcacgcgatgtctttttcgcaagttatcacgtcaggtatccgaggaacactgcagtggtccattccagctttattgcaatgatcttcgcccttgcaatatccttgttatgcatcgaggcttatcgttactggggtggttgattgggagttcatctatgctgcccccgtttaattcacaatgactgctccttggtggcttttattagaaaaaccagagggctgggagcctgatctcgagcaatttctattgcgttttatcccgagatttcgcactttgaggttctcaaagattgtgaggccagaaaaattcaagactgctctttgtcacaatcccaaagactatcgatcgctatggagaagtcattagaaactggattgttctggatttgcctcgctttacgatacagctctatgttcgatgaaatttattggaatttcatcgatacaaaattccatggtccatttacaacgatcgaggatcaacctactctgctcagtacagaagagcaggtagaaattgatgccttcgtggagactaaaatgcaagaggcaagcgagggcaatttggttacatatttacagcattgacgaactagttgatctataaacatatgatactgtgacgcgtttggaagattcattgagagcaagcaagaaaggacaggttttcaattgcaaaggaatgttaaaatggagttaataggaagcttagaagaaatggtatggacttttgcgttggttcgctaattaaagaggagaataaggcatatttgttcacgctcataagaactatgtatactgcgatcattcacactgctaataaaacaacgtatgctctgaccagagcattaattgatacatttaagattgagcatttatcgacttttagtggatcacacgacagcactgtcatagcaacgtacgattcatagacatagtagatagtcagttaggaccatgggtaataaaatcgtgaccattagaaacggtcagttgtgccaaggaatctcgaactcaaagattcatagatagcttatttgacgtcttcactaattaaatatagatgtagctccgtatctagacctcgattcttactgagcaaaccacctgggcccggggccagccgttcgatcaggtaagcagatcagtggcgctgtgggtcagcattggccaaacagcgctgggccgttaataatacatttccgacacctcgggatgtctttctacttacgcctctggtatcaagtctggattgccaataaatgaggacaatctcctagggctacctacagatagccacagtgtaacagtcaacaaaaatgcgagtcatgaaagtctggggttggtgtacggtgatgtatggtgatgtactggaatgcggagacgagacgaaacgccgaggcaatagcatatgtggcccccttgattggctgtgattccatgagcttctgtccaatgtaccgaagtattgaaatcagggctgtactgacactagaaatgggacagcagtacaaatcccccggttcttcccttttctcttcccttgtacttataatcccgcctttgctttcccttccttgagtgcagactcattcgacttcctatctcgcgccctctccgtcctatcacaatggcttcagctgccagaactgcttcccgggccttcctgcgctcgaccccagcgacttcctctttccgtcctgctgcgcgcagcacccgtttcgccatccccgccaatggtgtccgcgcctctgctcgtcgtggatatgcttccgaagctggctctgagaagtctagctcatcctttggcctttgggctcttggtcttggtgcccttggtgccgcaggtggagcatacctctacctgaacgactcctcccccaagggcccgttcgtccccacccaggccgactaccagaaggtgtacgacgctatcgcttcccgtctggccgacgagaccgactatgatgacggcagctatggtcccgtaagtgcagtgcttctgttcaaccccgcaatccaagatcaaagagctaacctagacgtttttgttgctctcaataggtcctcgttcgtctctcatggcacgcaagtggtacctatgataaggaaaccggcactggaggcagcaacggcgctactatgaggttcgccccagaggctgatcacggcgccaacgccggtctcaaggttgcccgcgatttcctggagcctatcaaggctcagttcccttggatcagctactccgatctgtggactcttggtggtatctgttccatccaggagctaggtggccctaagatcccctggagacccggccgtgaagacatggagatcgccgcctgcactcccgacggacgtcttcctgacggcgccaaggaccagcgtcacattcgcaatatcttcggccgcatgggcttcgatgaccgcgagatggttgccctgatcggcgcccatgctctaggccgctgccacaccgatcgttccggcttcgacggcccctgggacttcagccctactgttttcagcaatgagttcttccgcctccttgctgatgagaagtggatcccgaagaagtggaacggcccggctcagtacactgacaagaccactggaacgctcatgatgttgcccaccgatatggctcttgtcaaggataaggccttcaagaagcacgtcgagcgctatgccaaggacagcgatgtcttcttcaaggagttctcagatgtgtatgccaagcttcttgagctcggtgtgcccttcaagactgaggagcatatcgtattcaagacttctgattccgagtaagggaattgctcgaaaattgcctaatgttcctgtctcctttcgtatatacctgtgttgatatccgagtcattactcactaagatcatttttcttgttgccaatggaagtttagattttctccatatttgcatagattagtagccccaattgtattcacagcatgtaagtttcgccctgagtaggatgtagcattagcattggagcaattattcaatttgaatgtagaacagtataccttcatgaccagtaatgagaaaatgaaagagagaaaagaaatagccaacgcttgacatcaacaagtatgggaccgggaggccttttcccaaagtggcgtgcaagggcgacccgccattttcaaattctcatagaaacctctcagtaacaaagctcaccaaccccgctttgcagcacctgctaccccagattatcgcgataatttcctggaatgcacgcgattggcctctccactagactccgaggtctcaatatacagcctggcgcgtacctccggtcgctcgaacggaaacagcgcaatcagatacgacgaacaggtcctgaacagaaggaggaatttatgttgtcgacatgacgagaacggcgaacgctgtggatctatatgaagtcctgtctctctcattcacagggtcttcgtcgacagttctctccaagcagcagatcaagatcgcataccataaagcattgctacaacaccatcctgacaaggcgggtgctgtcgcaagggagaccgggctaggcagatcgactaactctacatctgcatctactccgaaccatctctctgccagctccgatggcaactcatcgcgacaactgtacaccatcgaccagattaccaccgcctacaagaccctatcggaccccgtcctccgctccgaatatgatcgctctctacgtctggacagactgaaggttgcggaacgggagaaaaccggcgatgtgttccacactggcttggagattgtggatttggaggatcttgactgcgagaaggcagagggcggcgacggcgactgctggtttcgcggatgtcggtgcggtgatgagcgcgggttcttggtcagcgaggaggatttggagagggaggcagagcatggcgagatcattatcgggtgtcgcggatgcagtctttggttgaagattctctttgcggtcgaggcagatgaaggatgaagggatgacttgccatacggtctgtcttttcctggtcatcatctcttctctagcataccgttgagattctggccggctctgcagctcatatcttgtcgctgtgcgataaattggcatcccgtggtttcatgtctgcgttggtctatgtctcgtccagagactaggctcgttggttcagacagggtacaggcttggccctggggctgttcgtgttcttctatcatgaacattcatttttccgaacgatttctcttgcgcacttggatctcccccaatctcttctggtttgtacacaccaatcttgtgggaccctgtgtaaaccaagagcttacaccaagcgtgatcttcgttttggactcatcgcacgttgactgagtaagactcaagcaccctactcaatcccaactccgacctcttgtcttcttgttggatctgtcaatcatgcatccaacaatgagcccgaatgctgtaccatagtaccatatatttacctgttaacatttagttctgaatctagataaggatacactcgtttatatatttattttataccttcccctagaggagaagaacaaagatgacaaacaatatatatccaacatcccacaagataaaaacacacttggtaattcggcattcgagttgacctcagtaatcctgcattttcaaaagtatcgaatacttaccatttgaaagaaaacaacaattagttagtatacgttcctggcgttgtccatatgaggttgatggtagaggggctgatgacatatgcggaggcagcaaaacacaacctcacatctttccatcctcttccaccctccattttacactcattccccccaacttcgccatgtctgtcattgagatctcatcgaaggagcagttctcgtcgctcctcacctcctcccgtctggtcgtggccgactgtaagtatttgctacagcgcgatcctgccccgccgagaccctgtcttcccctccgaacgactagagcttcgctaaccttggcctgatacatgaacagtccacgctgattggtgcggaccatgcaaagctatcgcgcctgcgtataacgcgctggcaacccagctctcccgcccgaatcacatcacattcaccaagatcaatgtcgaccaccaacaagagctcgctcaagcctatggcgtcacagcgtatgtgaaattcctcccaacatcagaatctagcctaacccgcgcgcaaattctaaaatatcctagtttactaacaaatgaacgatatctagaatgccgaccttcatcgtcttcaagaacggccgcgtgaaccaaacagtcaagggcgccaaccccgcacagctgaaccagatcgtccagaagctcgcatccgaggcaagccagacggacgatgcagcaggagccggtgaaggaagcagctccggtgagctctggctcggcagcacagtagccaagggctacagcgacatcacagaccaggttaacgtgaagggattggagttgttgaaccgggacacggatacggcagagccgcgcgctcttttcaacagctcgaagccctccggactcgcagcgaatggcaagggcaaggctgctggccaggcggattggacagagagtgacacggacgagcagctgatgctgtacatcccattcaactcgatattgaaggtccagtcgcttcagattacttctcttcctcccgcggacgccgatgccgacgccgacgagacacccatgcggcctaagaacttgcacatctacaagaatacttcgcatgtgcttggattcgatgaggcagatggtattccccccgtgcagaaggtggagatccagtctggtgattgggatgcgaagaccgggactgcgacagtctccctgcggtttgtgaatttccagaatgtgacatcgctggttttgtttttcgttgatggggatggggacagcgagaagctgcgggttgaccgcattcgcattattggcgaggcaggtgcgaaccgatctatgggcaagctggagaagattggtgatgagcctggcgagtaaagatagactacggagaaaaaagcctacgtacgctatggagataagaattgtgagctgtcttgtgtgatgaattttcaagacagagcttggggggatcaacatttgtgtcgactttatgccagtgatgatacggagtacagttcaacgtctaatgagagagccagctggctgtagaaattttgcaaaatttgatgaattgattccattgtatctagagctatagaaaatacccgagggcataaaaaaaagtatgtttgactcccaccaggaggtcttatccttgtgatatcagaaagacccataaaggtaagaatcaatgtgcaattcccttcgtctgtggcgcaactgacacctggggtacatcactgaaagccagactaatggccgtagatgtccaggcaacacgggttatcgagttgcgccgccgcacgaagaagaaaagaaagaagaggaaaggcgccggttgagaatttcttttatgccgggccccggagatttagtttttccgcttgcctttaacggaaacttccaaggatttcggcgcagagactttcattatgtaagccatatgcgaggagccaatttttttttcagttgatgctccttccttctttttctctttcttccataaacatggtcgatgatgagaaatatggattctatgataggaagagactgactccttatgggggcgtgatctcaattttaccattcctgaggcccttttgctgtttattcctgttggggagctcgacctgcaaccagggcgcgcttcgatatcagctcacaatagttgcttccccgagtcttccaagttaggattgcgttttaatctctcaaaccttgcagttagagttagtaacgcatgcacgagcacatccattccatatccatatgcggaacatctattcctgtttcttgatcgtaccatatagatgaaatgtctgacccgaaaccccatgaccttcgaggccaaattgccgtccggatatcaccgttgagacgaaaactgtacccatcggagaaaaaaatcagacaatgtcgcacaagcgtcaaaccatcatggagccccgtatgattagcgccgaagctggtacgcggagccgcaaatatatccaattcggcccgatagctacactggttgatgaccggatgcacccggcattctcgccttctcacaatgcatcccgtacggagtatagccgaaagaggatatagcaggtagctgtatggagtcctcggtatggacacagtgattacatccgcgacccgcagatggagttggagctcttggcactctatttaccgcgatgcaattagttcatctcgttcgtaggagttgacaggtacgtagccgagatcgcaactcttgttttttttttctcttccatctccatactccatccactccactgtaggtttggcggatagatgcttgttctaggaccatggactggcttgtggtgcaagttgtgacttggtgggtatgcggcaatctgtgttttggtggctgtttcatgaacatcaaagctggattgcctgatcgctattgaagattcgggtttgccggaatccacggtgatttctcaagtttaggtttgcttgccggttccgttgtcttgactatgcgcgcttgtgtttgggcttggcatggagaggcttgtactagctatattgaggatatgagttagttgtgttgtgtgttgtacaacttatgttgtagcgagttttctttcgcgaggtaccttctacctacctataacggtaccacgtcttggattcaggttctgtagaaacaactgagacccgctctagcccgcccggagatgagcaccgtccagtgttttgctgttaataacgcacgccattcagactgtgtatccactggcgatggcgtgtcttcaacagcgatttagactggatagactcggactggccgggcgctggacagcagacaagacaaagcaagacaccggcttggagtgaacagagtcacggaatataatttcatctcgaatagaccacgggaggtttgctgtttcatctcagcttaggctgtgatttcagcttatggacctagaacgagctccaaagtcattgatgagatgttgtgttgggctttacacacacaccgcaagagacagagacagccagcgtgttcgcaaaatagcggtcttgtctcgtagttcagagtcatcgccactacggagtagctagaccgaccggcagtgaatctgttacgtaccaaatattgcgcgggaaggtaatcttcttgcctttggggttagacgttagaaggagccacttttttggtttcgagactttatgagcctaagtcctgcgacaatcagattctacccgcgtccaatcgaatacacggtgtcgtcatttgatcttcttttcagtaatatttgcaacgctcttctgaaatgtgttttttttagggatatatgctccttcttagacacgcggaaaagggcggaaaagggcggaatttgtgaaaacgacttttctatgcataaccttggactcgccgagcactacatatactaactctttgttagcctagggccttctattcctagaaatctcggtcctaatagaccacatggtgattgcaggaaaaattcaataggatagttaggggtgatttaaacaacgcaaaatgtggagtttgtacctgaagtagatgggaactggagccggtcgtcgatcatgatagttcagggacaaaggtaggcagtcgccgaaccggacctctccgagttggatacagctgatacgcttaccggatagtaattagtacacttctattctgtatactccacatgatgtacacgctagatttgttcttcggggacttctagtgacttgggtggggaccgacgcccatagactacgggatagcgcgatgttggagaaggtttgcacctcatgtgaactggctgcaggtgtggaatgtttctctatcatcgtgaagccgcgtacgacaatcctaggcctcatcgggaatactccgccagatgggtacatagtgaacctcagtaccagggaaccatacaagattagatcagatagggcccggagaatcacatcattctggactgggaccccattagtaccagagataacgatactcgtacgacgatctaattattttccgacccactgcgtgtcttggggacagcccgataattggatgaaactatacaatctacggagtatgttggagtcttggtacctgagccaaggaagcattccctttttatattggggtcggtccagggcgatagagatggttccacagaaatgcgaaaaggacttgaaatccaagtgagctacctggttggcgaggccaggctatgccctaatgcatattcccaccacgggctggcaagctatctccgcactcatatatatatattgccgcgtcgcaggctcgtgccgagtccaaaaatccttcgatcgaagctggctcgttgtaatttgtccaatttgtctaatctgtgggctgtaggccgcctgtgtggagagtggggatagtcttcacgcaccattccccattctgccaagtatgctgtagtcgaagcttcataaaactctgtgcctgaagattgcaggatacataataagaagaacgtcgagaaccttccaccggcagagttagcttctcactttacctgatagagtgttagtggtagcttgaaccttccaaagctggaaatatccgaaccgtcgaggaaccatcgcaattaacgagctgataactccaagtggaccgcagactcgatgcgcagcagatcttacctgaaattatccctggcgccccccacgttcttccagccacgttagcacgccttatagttcggtagttattaagtttgatgtgcaacactccgtactccgtgcaatgccgcaccttaagaggtagaaagagctcgaaagagcaagttgcaagcgacgtacggctgatcaattggaggttatccaggtttcagacgatcggctcagggtctggatgccacactgggtctagtgtctcgggtgaagtagccagttacacgcggtcctcgactgactgagatcgcgatatgactctggagtccggagtattttcccggataccgaggaacatatctgaaacacatgcctagagactagcacgccactcttttgactgctaatgctgtcggagtgtggaagttgatacaaattttacaaattagttcttcctgcaattgtgccaattgcgtcgcattgccagacctccttctacagagtgctttgacataggatagagtacaatgcaacaccacggactccgtccatacacagtggtagcgattgcggggccgtttaaatccctgattagccaaaccatgacgatttacccgcgaagaacgatgcgctcatcctctgctcaaccatggttgtgcgactgtgtggaaatgggatgatcgagttcacgccccccgcactttgccgtatgtaacacccatggatggaccgaggaccttggaagggatatttttttttggaactgtgtatctctgctccgtatgggcgtagcagtggcgtcccgtgcgcaactcgcctaacagtagttggtggcagtgacgccacatatgtttggcgtatagatagcgaggtggttttgcggaaagcgccttgtgttgtctgattgttatattaaagatagccgaactgtaaccacctgatattaagaccacaccagattgatatcgactgagatactgagatagcaagatagcaagatcggatctcaccactacaacttatgctgtgagggcgaaacctcttagttctcgtatcggactcatttttcccgattgggaagccatctaccttccgccatcgaggcagtgagctattaacagctaattaatttcgccctttgttattattagcgattccccgtcctcgcctcttccaacagtctcctgctcattccagaaaacttccctaaccggccattttgaggccagtgccctccccaatggggaagtatgtccagaagagagaggtacaccgcgaagtgcaaagtatgggctccgctaaaaatgcgaccatcgccaataatgccccccaaaaagagtcggatccattctcgaaacgcgaaactcgaaaataaaaagagctaagccaagaccgggcccaccttggcgtcaacagcctcagaaaacgcgtgttcttgcccattctgcccagatacggctgcttcggacggtgtttcagattttaacctcaacgtgcggaagtgcccgcctaattatcctgcacagttgactaaattaattgcaaatctcaaacaatcaaattcccgagtcggtttcgggggaagggttgtgtacgtcacaaagtctcgctacttttcgaacactttccctcaaggtcactgctatccgctttagcttctttttaattaggtacatgcgccacttaattcgttccttcgttttagcgtccagtggccaacggtcataaaatctggggtccttgcgcgtcttgggcatctgaattggggaacttctggaattggaatggttcctgtccactttggagggctagtaatctcaagcgccccagcgctggtacccgcgctggtctcgggatttgacaaccctacaccctacaccgtagtacaccgtagtagagcctacaccgtagtagagagtgccagcaacatagtagtcggtctggagggctgggtctgtccattattggagtatacggtatagcatggcaaacactggagacttgcaaaagcctttttccgctccatggcatgattgagaaccaaactctttcaatcctttaataataacatatgatgtattgtatgttgtttacagagtacagagtactacgcgaacaatgaactttttttttttttctagcctctatctagaagcctcggtggtcccatgtgaatggcctcggtggtcctcaatggcgaactaatccctgcgagtcttctgccaagaaccgttgacaaaaacccaagcgcagaagggccgtgaattccttccggatctactatccacatctctttgtgacattttgcgacattttaagtctcatatcgtctggtgtatcccaaacccacaatccttgtggcgctggcacctacgtttgcggaatcctattctcctttggccttgtggattgccaattgccaattgtgggtttggatgtgtaggatacggtgaatccctggtggaccagggacgttatgctcaaacccaccgatgcatgggagatcctcaacggtacattacttccgtacctatcgcgacatccaaatctgaacccttgctgcgggctctctcggtctcgccccctccggggaaagactaatccgagactctgcatatatctcgtccggggttaaccatgacagatagactgatcaatttttgctgacgggctgatcctcgaatatgggcatattatgatcgccaaacggctacgcgcatcgcagacgggaagctctcacagacatccccatagttaaccgccagcagccgagcatgattcgtcggggaactgggaagatgctcgcatcctcggccaagcacaggttttttttatttttccaaatcgcacggtcgattctgcgatcagggcgagtccattttacttggtaattgggagtagatcaaaattgatcaatttgcctctttgttttgctttttcctctttctctctggacaaagaagaggtgtgtactccgtacaccgtcaatcgtactccgtacacttcctccacttgggtctccattcgagagccacttgggggggtccggcttccctggatggccttccgcggcctttagttggaaactaggcactgcccgcccgcttccatctccatgttctccactctgcctaagagctggtgtcaaggctagaagggccgttgggtagaagtgatttggaaggtagcttgttttatcccgcgtggaagtcttgatttatttcccctggacttttctcggggggagctctctgataggctcctgggcgtggagctattggagctgttggagctctcgagtgacgactagggaaatgtggacttcaattcaatagcgcctagatttcggcttccggcttcaatccatcgttctacataagcgttggcaacgagcccgtgggattcgtaaaagccaaaataaagtcgtgccgtctgtgcgacaacggtggcggcagggattcgggctatcaaaaagtaagtccatagtctcaaggccagggccaaattttgagatctcgagtcggaactctgtaggctcacggaataaagaaattgggtggcgcaaaggtactacggagtaattagcatcaagattagaaagtggatggatatggaccttggaacttctcaaagaaggacttgacagccttccatgcatgacccttttccatgtccacgggaagtatctaagcccaaaaggaaacactcgaggcccggagacccgggtgtctccagtgtgtctgtacgagtacggagtctccatacttcacaccgtagactatctttgttagagtggaacggcaatcaatatctatcagtgactctccaatttccccaagtccacattggcgtgctttgtatgtgtctcattggtagcggatgaagacaaatctccgctggcgccgacgctttgcctgtgaagggattagccaattggaggggcgcactatctttagaagtggccaatcacgcacgagatgctccgggttcctgacattccttaagtgccgggatattagtgtcggtttttggtctggactcgagggagaaaaaaaaagggacgttggagattaggattagtgacttggtgacttgggaaaatttgaatgattttggtggatagtttgtatcttaatgtacggcgtagagaatgtgccacgacctggaaaataagaatagaactggaccttgcttgcgtggccggttactgtatgtcattgggctgtgttagtcgatgtgtcggatgatgcatctgtttgtgcttccgagttttcaacttgggatgagaccggtcacagacaacacatgcctaccatagtgacgatgacgcccatggagtgcgctgacatatactaagcgcatattcccccggatctacaggtcaggtcagtgagacaaaaagtgctatcacatcaccctgcaaatcggaacacatcacttagcgaccacattgacccaataagatgcatcataggtgagaccccattaacgagcatctcactaatgtactggacttgggccccaaatacaatataagcaccaatattagccttatgtctttgatcgtactttagcatatgtagtctggggatccaatcaatggacttagggcaaccgaagtcggtacgaagtacaccctcgacgatttgagcatcaaagggaactgcatctgagccttgcctttcgagggccaagcacccaataagcatgttttatgtagctgcctgtgtgatcttgccccccacaggctggttcctgcagtaggccgcacaagtagactgaaatctcgcctttctcggcttgcatattgcatacaacataggaattagtgtttcctgtttttttttctttcttgctttgacgttttgctctgcctgaaatattgatgccattgacgtgtacaatgtgagatttgtctgtatggaccaaatggcatagcccttgcagcgaccggacaataaacacgggtttgtttacttccaatataggacccatgtggcaaaccaggtacgtacaacttacgaactacgaacgttatactccatactctatataaagatcttcaatatggatgggctccgaccactttgatagggttcaacggcttttgattttcggtgatgaccgcaccgaggggcaatacctaggtcatatgaaatttggccaggaatgcaccgagtaagcactgtacggccaatgccgaccgtttcacgatcgaaatcagatggttgcacggtggtcgccaccgttgatagcctgatcggcaagtgctgagcgacttggggatgggcagcctaaactggcaactgattggcggggccttggggtcttaagttttccacctgttgatcacggcggaacataccgtctggagtggacagatgggaagggattcttccgttgttaatttcctatgtgcagttggatgttgcctgccattagaagctttgcaaggtacctaggtaaccgtacagggtactccgggggtacattggtctgcggtaccggacgggatgcgtgggcccccaatgcttcggggctattggttcccgaaaaagcaatgcgaaaagaagaccgtctgggttagagcgctcttatttgtccgacatcgccttgataagacggattgagcaattgattagcgctgtcaccatcatatagtccaatggtcatgcacctcgtggccacacctcaatttttagatcaggtctcgggccactctttttgcctctgaggactttgtccaaatcaaaaggacggccaaggtatactgtaaacatgtaaacagccccggtagtgattgaatggtacggccctgcacttggccgaggtgtaggtacaacaccttactcctttggggatgaggaccgaaacggtacttgggtcaagataataaaaacgatgtattatcataaataaaccaaaatatggaaattcaatttgatttaacttaattgttcctgagtgctccaccccaccgagcccactaaactcctccccaatcaatgcgattggccgcgtctgacgggactgagcacttgatgtgcacccagtgtctttcgcaatcccgccccggactggaatatctcttattcgattattcgattattgcattattggtattttcgatttaatcggaattcctgagacaaattaaaattcagaaaagaaaaagcacccggttcctggcccacacccaaactagtgacccggcaagtagaaaatagtagcagatcactcatttatccaccgtagcctgctatcttccctcaattgtcttctctcgctcgctttttttttatattttccccgctgtctattttgcatactcacactctctctatccaatcttttttttatttgtttgactattttgcctattttgggttgggggtttcctattggacttatttgggatcctctcttctatatcactcactctccttcctcaagtactttgtctcccggttcccagaacctgtccttcctttctcgacacactcattcatcgtcaacacatatacaacctaattgcttagtccattcattctttcggactcgaatcacttataatcctactaatctaccgcgggagacttgcaattggactttcaaaaacacttcaggtatgtagtatatctctataacattggtctgcctcttgcttcttgcttctaactcatccttgcagcatcacattcacaatggactcaccatacaatatggcacccacctcggtgcaaggccagccattcgcatactactccgactcacagagacaaggccactaccagtcagacatcccatactacagccagatgcagtatggccaagagcaaccgctctacacgtcccagcccatgatgaacatgcaccagatggccaccaccaatgccttccggggagctaccatgagcctgacaccgattgcctctccacagccctcacaaatgaagcccaccatcatcatgcagcagggttcgcccggcttgatgcccttggacactcgctttattggtcacgacttgtactccttcccctcgactcctccgctgtccgcctcgggaagcaccatcagcagccccccgtctgctcatggcgccctaccaaccccgattcatgacacatttttcaccttcgacaaggtcgagggtgtcaaggagggatgcgagaccgacgtgcaccaggagctcctggccacaccgcagtgggcgcgctctgattcgcccccgatgacgcctggtgagttttatagatcacactttgataacggaatgtggatcgtgggaagcaagggcgaaaggctaattcatcctacagtcttcattcaccccccttctcttaatcacatgcactccgaccttctgtctgcaacatcctgcccctcgctttccccctccccctcacccgtgcccaccgacattcttgcctcccacaatctgggatcgagccagtctttctgcgatccccgccagcttaccgttgagccctgtgttcacgttcacgcacaggatctccctcctctaccgaatctctcatgcgaggaggaggaacctcgcgccgttgttggcagtgcgtctgtgacgctccccgttaacgagaacccatctccctctttcagctcctcgacccaggatcctctgagctcgctgccgacttttgacagcttctcagacctcgattctgatgacgagttgaatcgcctggtggaattccaccctgccgccaatgccgtctacatgggtggcaagcgccagcgtatgcacgcctacctggtggaggatgatggattcctgagcgagcacagcctcgaagactcagatgattccgagactttcttgcccaatggtttgccatcctttgagtggacccagactgctcaccctcaggccgagagcgaggaggaacccatcgaggagcccaagatcaagaagcgtagcaaccgcaagtcccgtaagaccgctgccgacgaagaggctgaggcaaaggcgctggccgcctgcgagtcctctggcgactgctgctctgatgacggatcagttgatgattccgagtctgctcctatctcagtcaaccgccggggccgcaagcagtctttgaccgaagacccctccaagacctttgtctgcactctgtgctcccgtcgcttccgtcgccaggaacacctcaagcgccactaccgctctctccacactcaggacaagccgttcgagtgcaacgagtgtggcaagaagttctcccgcagtgacaacctcgcacagcacgcccgcacccacggtggtggctccattgtcatgggagttctggatgcaagcgacgctggttctgtctcattcgacgatcaacatgacgctggtgcccttggccaagtcatgtacgaggctgcccggtctactgaagtcatcggtactccccccgtggatcgccgagcagcgaagaagcgcaagcgtgacttgtcctaagggacttttcatgatttttcttttatgagaccaggagacttcctactgcatatataatacatacattcttcggtcggagtcttttattgggagcttgaccatattggtcttgattgggtttggcgtccgggcatttacactggtgtcggaaactggatcatcggtgcacagcaacttgcgttcccttttcatttagcgttttgacatatcgcacggggacacatacacacaggctggattgcctcgaacggttcttttggtgaaggcacatgggcgcagaagagtccaggaagaaaaaaaaaacgacatataaagcgatgatggcatctgtcttcggcagtgctgggaatggtgtgatattatttcctttgtcaccttgttcttctcttttttttttcctttttccttttgtttcacttgttctctccaatatcttctggaccagcacattcggcgtgagcaatgtgcctcacactttgaatcttcgagatttcccttcgtgtactccctgtttacttcgattcttgtgacttttttaccctttttttctttttctccttcttctaccgtttcgttcatgcttgtttctgcttattcgatgtaatatttttggtgcttttttgctttttatctgcttttgtgtgctggtcacattcgtgtataagttaattgacccttgcccatcactcatacccccttgtattgcattgcccctttgtgttggttccaggtcacatctctagatgttgatttacatgcatcaaatcacaagcataatcttactacactctttcctggtaaacagtattgtactaaaaatagcgaaacgtaaagttagggcagtgatatctgatcccgtgatatctggtctcgtgacctcaggatgtcgcactgatcttatcgctctatcgattatcgataacctcggaaactcacgcaaaggtggggacagcaaaaagtacccccccatcacccgcacccagcaacatccaccaaattcgcgaaaaagagaccttggactccacacctgggcgtatagttgttatgtctgcagcacagccttcagccccagggcttaacgtgattgccctaatctccggtggcaaagactctctctactcgatcctccactgcatccgcaacggccacaaagtggtcgccttagccaacctctacccagaaccgcggaacaaaaccgcaagcgcaagtccaaaccaacgcaaaaatgacgaagaagaagacatcgatagcttcatgtaccaaaccatcggccacagtgtaatccctctctacgaaacagccctccaaatccccctctaccgccaacccatcacaggcggcgcagtcgacacagcccgtatctatggaaccagagccaccaccatggacgagaccgagtctctcgtcccgcttcttcgtcgcataaaacaggctcatccagaagccaacgccgtatctgcaggcgccatcctttctacttatcagcgcacgcgaatcgagagcgtcgctaaccgcctgggtctgattcccattgcttggctgtggatgtatccatctcttccagcccctacggctagaacggccgatgccctggcaatacgccaggcggggctgttggaggatatgtcggccgctaggtgtgatgctcgtattatcaaggtcgcctccggtggcctggacgagggcttcctgtgggagaatgtctctggtgttgggagtggcggccgcatgatgcgaaggtgtcttgtcaaggctatgagtcggtttgcagctgcggaagatatccgtggcgcggtgctgggtgagggcggagagtatgagacgcttgcgctggatgggcctggtttcttgtggaagcagaggatcgaggtcggtagtcgggaggagaaggttggtgatgggggtgttgcgtttgttaggttgaggggggctaggtgtacggctaagagcgcgtgggagattggcgatggcattgcgccgagtgatattaggcggcctggattgttagatgcggtttttgagggcgtgttaggatctgcattggaactttttggctcgcttgacgattcgaaatcgcgggcgatgacgagtactgctcggtcgccagattggcctgtctgcgagcccgtgcatcggttgtctggttctacgtggactatttcgaatattgttgcgcccgaggctggtcccggggcaggacagcagatgaaagcgattgcatacaaggtcgagaaagtgctcaagtcctttgcccaccccaagtccggttcccgatcaacagacgacattgttttcgctacggtgctgctaaattcaatgaccgactttggaccaatgaatgacatctacgtctcgctattcaagaagcccaatccccccgcgcgagtgacagtggcatgtggagaccgtctcccgtctaacgtcaaggtgatggtcacattcgtggtggacctgggtgcaagggaacggcgccaggccctgcatgttcaatccaggtcatactgggcgcccgcaaatattggaccatattcgcaagcgttgtcagttccgttgcagaacgatagcagacttgtgtacattgctggtcagattcctctagatcctggttctatggacctggcgcgagtcgaggggtcaagttcatggattgaaaattaccgtcttcgagctgtactggcccttcagcatctctggagaattggtgaagccatgcaggtaaactggtggctcggtgcggtggccttcttggctcgtggcgaccacgctaatacccaggcgcaagtggcatggcgcctctgggaaagaatgcatgctttacctgacaatgaggacgaggatgatgacgatgggccacagctggacgcgtgggatatcaaatatggccgtcgcacagaggagctgaccgatacccctgtgcccagtctgccccagttcactgctcttgttgagtctcacacatccattccaccattcctggctgttcaagtggatgaactaccacgaggaagcgatattgaatggcaaggtctagggggcctgtgcgagcaggtcaagctggacattaaaggggggacatcttccaccaccatggacagtcaatacaagtataccaatatcgagatcgacgcgggttcgtcggacgatacattgaagcaaatattgagatcagtgaaagaggcttactgtcgagattccagtctgtctcaggctgtgttatataccacatacccagtgcctgaagcttcgtggccagtgcaggttgtgctgtgcagatcagtatgggggcgagaaggacgaaggttgagtgcaggtgtggtcctgcagcagtttagttaggcactatttcacaacgaataaagccactcaatttaacaaaagatcagacaaaataatatttaggggtcaaaagatcgttaaacgtcgatgctctactccaccgatgatcgatgtacgcactgtccgctcgcatgtgataaggcaaaatcccttccgcattcaggaaaagataacagtgtcattctgcctccgccacgttctcaatatctccgccatcgaacttaaacaggactaaattgttagttaccctgctctttttctggacgttatactatcctccccatacattgtacatccttatcccaccgcggcatgacgtactcatcgacataagcatggcgccatgagttcgccgtggaaagaagaacaagaagcgacgtttcgcaccagtacacctctggaccccgaagcgttcgccgaagacctccgactatttaatcgctccccccatccataccacagaagtcgacgcctcggatcatgcactccctccgacggcgaccgtctccacccgctctcctcctactccaggtcctcacgaacaaccagcgacagtggcacagaggcagacgatgaaagcaccggtattctaaggggattacctgccccgcccctccgtcctcgaaaaggcctacggtctggtggggtgggtctcactgaggtcgatgactggctgccaagtctgcaaccgtggccgtcatttgtgcggcctattttgcggacgtcgcggcggagctcggaggaagaacttgaggaagaggcctttgaggagagactgaggttcaggcgccagagacgggtggaggttctccggcggttgttggaggctgcgcttttgttgtctgtgggtggcgtggtcttgtaccaagaccgggcgcgctccttagcttgggaatggagaaagggtatggggaaaactgatattgctaccaaaaatctggggcgcgctaattgatatacagagcttgctgctcatgccctcgtggtcttgggtctctatgccagctatccgctcgctgttcgagcatcgcaaggccgaagctggcgcatctggcgcatctggtccacgaaacggacatacttctcaatacccgcgagcttcgatccggccccccttctctatccgattcttatccccatcttcgtctcgttatcgctgtccaaccatctcccgccacttatcatgcctaatatcatcctcagcctctcctctttaccaacgcctgttataccgttccagaaccgggcgaatggatttgataacctccattggatggtctctatgattcccatcctcgtttccgaacatttctcctcggaccatactgtacccaaaccattgacgcttcgcgggctcgacgcagagtctttaatacttcttttccctttgcatcaagcgttgatacccactttagactttttgttgacgaccagcattcttcccgctgagctgcagcttttgacaactgctttgatcaacttgtacttgtttgcggcctctccccagatggagatactcaaagccttgttatggcttggaggcatgtgtttgtttgcttcttgtcgacatatactgcgttgggaggtttctttggctagaattcccagctggaaattccgccgcgccccacatggcgcgcaatctccccgcaaattcttgaacatgatggaccatcgaatttgtgagaagttgagtagaacggcgcacgttccatcggacgatgctacatcggacagcgatggccctaatggcttcatgttttcaaggccgcgcaagacgaagaccatgcaggataatcgctctttccgcccatcggcagagccgacatctgcagtcgaccaggtcacgacggaggcgattttcgagaagcatgctcgtattgtgcatcgacgacgccataccatatctacattcgacgaagtcgttcgagaggaacgtgtccacaccacccccggtggtagacgcaagaaaatgatgggtcctggcctggcctccttcctctcgctcacttcagcccaggcacaggtccgaaaatggttgtacgcattttacgtgtatgttctgtcgctgattatcattcttgggcctattcgaaagtacgtagcagagcacgcactacaaggccaggatccgttcggttgggctatcggctacctgctgggaaacttctcgaaaatccgcttttgggtgcttatgttgaaccttgaatactggatcgaactgccaccccgccctgatgcagataatctgagtgcctcctgcttccttgggtcggtcgaacatattcgccaggctacttttggagctgccgtgacccgtctactactcagtggatactgcgcgttggtactactgacaggcctggctattgtggttaagctcagctctgttgccgaggttgatacgcgccgcaagattttccacggcatgatggtggttatgttccttcccgcgatttttgtggatccagccttctgcgccatggcgctagccttggtcctctccatattccttctacttgacctattccgcgcatctcaactacctccaatttcgcgaccgcttacctactttctggctccgtatgttgacggccgtgatcaccgtggcccggtcatcatctcgcatatattcttgctaattggatgttcgatacccctttggctgtcgctttccgatctccctcggactggcctgggcccctgggccggttgggaggtaccgtcacgggatgtaagcatggccagcggagttatctgtgttggcatgggcgacgcggctgcatccctcattggccgacggtacggccggctgaaatggttctggggaggcggcaaatcacttgaaggcagcattgctttcgttgtagctgtcacctgcgggctgatcgcggttcgtgcctggttggtgctcggtggctggcccgtgtctgggctcgaatcggctgcagtgacagctttctccgctcacttctgggcctggactttgctcaaggcggttctggcggcagccggaacgagcgccaccgaagcaatccttaccggttgtaatgacaatgtcgtggtcccagtggtgttatggctgctggtgcggggtcttggcgtctgatgtgccacgttgatgtgtataaatgcgcgacatgtttgcttcctatttcctgacctttttttcatttcttttttttgctcggaggtttgcgtgtgattatttgcctatcatatccctacggcattttgtatagtatggtggggtacttagcccgaggatgtatagattgacctcgactactcaaccagagaccatgtttgggtgcctatactagcggcgcgtcattgcatatctgccttgccttagcttcccccctttctctgaatttaaccaaccgctgcgccatgactgggagccataggctgcagataagcttccgtcaccatacagttccatcgtgttttgtgatcgatcacctacctttcaatttggcagtatttatggagtacaggaagatacgaagattgcagaagacatcctccgtttatagaggagccttgctagagtctagacactatatatagagcccaaccccacagaacgcatacgtatatgtatttcttcaccccctagtctccggtataattccggtatccgtgatctgccttgccgatctcggccttatctaatcgataagcacatgacctagatcactgcgatttggacactcccaaggttcttttttgccgtccctggcgctttaaagagggttgttctcgatattccctataatttggacaactgattcatttcctctatcatttgtctctcatctctcattccccccagacttccctgtaccttttcatcttatcgggcagtccagatcatctccacccctctgaccgccttacgcgatcatcgccgcttgtcactcgttatcgttgggtcacaccccccaatcgtggagtatccctgggtcttggggctctcttcccgtttccaccatcacatcatcttgctctttcattaggacttgtcattttgcccccttagatctttggttctctccatattatactcaaatctcctaacctcccgcccttttggctattctgcatctcacctctcaccgctttaagtgttttggatcaacttgtgtttgcttccttgaagtacatcgttctacatcgacatcatttcttataatctacccgagttcaccggtctcgttccacggcactcagttgcagtaccttcccatacccattctcccggcggttcctcgtccttccaggcttcccggaggcatcgtcatccttttcatagctcccctgatgggcctctcgagtcgatcgttcctattgctgctgctgaggtagttgtggttgctggggtgtaactcgatctgatttcccccagcgttagtctaccagagacagaacaggcattggcgtgcccaccgccgtcatggcgtcccaacattcgaggagatcgcgcgaacccccccgttcagagatgtcgattggtcgctatacacggctcgatgagatcgggcgaggtagtttcgcgacggtctatcaaggtatccatacagtgagtcgtgccttgtcttctaatatgtcaagttgatggatgctaatcggttcccatcacagcaaacgagaacctttgtagcaatcaagtccgtgaacttgtcgaagcttaacaagaagctcaaagaaaacctttcgtccgagatcgatatcctcaaggggctacagcacccacatatcgtggccctgatcgactgccatgaatcaacatctcacattcacttggtcatggaatactgtgcactgggggatctttcgctgttcatcaagcgccgagatactcttggatcacataaatacactcgggatatgattgcaaaatatccaaatgcacccggcgcctcgctcaatgaggtggttactaggcacttcctcaaacagctttcaagcgcactgaaattccttcgtgaccgaaatctcattcatcgagatatcaagccacagaatctcttgttgtgtccctcaccttcgtcgtatcggaccgggactgctcaggtaattccttataaaggcagcgatgactcttacgagcctatgacggggcttgagtccctccccatgctcaaaatcgcagatttcggcttcgctcgatctctaccagccacttcactcgcagagactctttgtggatctccactgtacatggcacccgagattcttcgttatgagaagtatgatgccaaggccgacttgtggtcggtaggtactgtgctctacgaaatggtggtgggtcgacccccgttccgggccacaaatcacgttgagttgctgcgaaagatcgagaaaggagaagaccgaatccgctttcctgaagataacccggcctcagatgacatcaaaaagttaatccgaggtctgctgaaacggaacccagtggagcgattgaacttccctgagttcttcagcaacaatgtgataaatgatccgattcctggcttggtagcggatgaccttccagaaccaccacaatcgccacggccgaggcagcttgccgcaaagactgaagaatctccttataatactgggcctgaggacagacttgcatatcctcccggtccaagacctgttgcaacacgcctaagatcaggaacgccgccgaccgctacacaaatgcgtcgtgtgggaagcgctgaccggcctgctcctggtatttctagggagcaacaattgagagctgcaccagcccaacggcctggacctgtcagccttgccactgccccgggacgccaggagcttaccgaacgcaacgcaactactgcggccgtcgatcggcagagaaaccggaacacttacactgactcttccaaagctagtgactcaacagtccgtgcccaggaggcacgagatcgcgctgcacaagaagtggcatttgagagagactatgttgttgtcgaaaagcgggctgtggaggtcaatgcctttgcagatgaactggctcatagcccacgccttcgaggcggcctttctcgaccaggacaaactggcgccgccggccgtcgggcaacaacgcagggtctacctacagtgtcgccatcttccccgcatgccaatgcggctaaagccatgcaggttgtttcgggtcgttcgcgagcagattccatacatcagcgccagcattcctacgagcgacgttacgggcaaagccctacgtcggcgacctcggcaatctcgaaagcactcaacatggccagcggtcgtctgttcaaaatgggcttctctcctcccctcaccaaaggtgggcgatctccgcctctagcctataaccctttccccgcctatcctcctacacatgccagtcttttgatcaccggagacggctccaaacccaatgcaaccgtagatgaagattgcaaggcagttcaggaaatcgaggaatgtgccacgcgtagtgacgttgtcttcggatttgccgaggtcaaatataaacagcttgtcccgctagcaccttcggcaccgactgatccatctgcgagacctatggacacaaacattgaaccagactctgccgattccgatgatggcctgacagttgatgctattgttacattgtccgaggaagctttggtactatatgtcaaggctttgtctttgcttgcaaagtcaatggacattgctggggcctggtggtcgcgcaagaacagagaagaggcctatggggagttccccgccaaagacagcatgagcgcagctgccggtacccggatcaactacgttgtgcaatgggtgaggagtcggttcaatgaggttatcgaaaaagccgaattcgtgcgcctaaaactcatcgagggtcaacggcgattaccaccagatcatcctagccatccagataaccattccattggctccaccgccggctcgagctcaaccgccgatgtagtagtgagccccggcgtcacagcggagaggctaatgtatgatcgcgcacttgagatgagccgggcggctgccatcaatgaattgactggcgaagatcttgcaaattgtgagatcacatatgttactgcgattcgcatgctcgaagctgtgcttgagagtgacggaacgcgatctattccgggtagcaacgaacggcaaagcggttcgcaacctggtgacaagataattctggacgagctgcaggtggaggatcggcaggttgttgtcaaacgtgagtcttgtgcaagtccatccggcggacatatccaaaactaacaccttattctagtcgtatccagtatgcgtggccgcctcgcatctgtccggaagaagttagctgttctatccaagcgatcctcggcgccgactccaacggggggcaagacacctacatccaccatttctccggttgcatatgccacgggggtgacaccgcctagatgagcactttgttctcccccgagatatccaccaaatctattgggattattacgatattgttcgattcagtagcgtcatgattatagccttatatgtataaggttaactcacgacgctaacaattgaccctatttttcacccgcccttttatatatggtaacctctggctaaccccaatgccatgttcctctttttgccatttatctgccacttacgtttctacgaagactaatttcttcgttcatattcttcgatctatttttccagttcacctcttgccatatatcccacagcacgaaaccaggggagttcttattcatgttatttatgtcatgtcatgccttattgcttttttcttcctttactttttctttacctttcttgtcctcattttcggattggcgtttgacccggggacccacggtatacagattggcactgagtttttttttgggctgggaacgcacaaggtcatggcgttggtgtgctccaatattggatttggtgcagatgctgccagatgtattgtacatagaaattgaggaaactcattacatttttttgtctctatactgcgtaagtaacttgcagctgttataggatatggagcacgagataggtatgtgctctacaggcttggctaaggttggcagatatttacaaacgcaagtaaccctgacgatggcgtgcttgactatgtgtcataagtctcagaatttcttcctattcatttaacaccttgggcctttgcctcttggctttttctaggcacagcatattccctcaaagagatttatatgatctccctgacacatgtttgagcctaaaccattgccgaaatcactgacccgacctccatgtactatgaataatatcttgcatttttgaaataaccaacagaataactgccagaaggaccatgtttaccgtagttttaccacggcccgtcccccaaatgtatggatcctcagcagcccactcaccctggtcaccgcaccaccggtctccgaggcttttctttgcgttttctttcattgcgccatgatggttaagacagacgacatgaatcatgcgctgctatcccatttccaagacaaatgtatgtctaattgggttgccaattttcgtgcaatgtaacgtcggcatcgccaggcaatggtgcgatgcagcccgtagcccgtagccttgcccaaggcttctggaactcttccatgtgggccggattatacggatgaaacccacaaactctgctgggacctttgcctccatctggtgatactccgtacgggtcttccaacttgatttccagggtagtaaaaggcgatgcccagccgcaaggacctatggcatcacatttagtactagcacctcatttttgcgccgttgctagccgtcctcaatttgcctcttggaagcgcagctgaatacaaatactcatcgatcgattccactgtgtgggtagtgacttgatctgcataacctaataatggctgaacgggttgaccctgttgttgaggcttctgataagtcgccagtatttgctacaaagtcggccggagatgacggcctccggcgagcagatggtatttcgggattgtgtatgttcttctctatatcgagtgatggctgcgtgacacctctaatcgttctgcgttcagatgaaggaaatatcttcgaggcaacccccgacagccgtcgtcacattggagtattcagtgctgccctcttaatctttaaccgggttattggtacgggtatctttgccacaccaagcactatccttgcattgactggcagtgttggtctctcattgttcatgtgggttatcggcactgtaattgctctagcagggacggcagtatacctagaatggggtactgcaattccaaggtatgttattgaacgaaagtatcagagagaagacttgactgattaatctggctgtatagaaatggaggcgagaagaactacctcgaatacgtttataccaagcccaagttcctggccactgccatgttcgccgcctatgcagtattactcggatgggctgcaagtaacagcgttgttttcggtcaatatatcctcaacgcagcagaagttgaggttggacgatggaaccagcgtggagttggcatggcctgcctcactgccgcctttcttatccattccgttgccctgaaatggggtattcggcttcagaatgcgcttggtgttatcaagttgattgtcgtcgtgtttatcattgtttctggttgggcggcacttggtggccatacaaaggctgagacgccgcataacttcaaaaatgcgtttgaaggcaccaagggaagtggatatggcattgtcatgtcgttgtacaacgttatctggtcctttattggctattcaaatgccaactatgtaagaacatgaacatatgagttgcgtctagatcacattgctaattacatttacaggccttgagcgagacaaagaacccaacccgtaccttgaagattgcagcccctgttgctatcatatctgttggcattttgtatatgtttgtcaacatcgcctattttgccgctgtatcgaaagaagaaatgctcgggtctggcagcattgtcgccgctgtgttcttcaggaacatgttcggcaaacaggccgaaagagctatgtcggtcttggtggctctctctgcctttggcaatgtgttgtccgtcatcttctcacaagggcgaagtatgtattctcacattcacatttgaacggtatactaatacgacttcgataacagttgtccaagagctcggccgtgaaggtgttttgcccttttccaagatctgggccagcaactggcctttccactcgccagccgctggcttgcttgaacactatatcgtctcggtcattatcatgctcgccccccctcccggtgacgcatacaacttcctcctcaagtatgtgatttctgaagacaccgcaagatcaatactgaccaattctcccagtctcatctcttaccccctttccattgtcaacttcttcgtggccgctggtctcgttcatatctacctcaccaaagagaagaactaccccaactggaagcccggtattcgtgctacactaccagtcaccatcttcttcatgctgtcaaacctgtatctcgcggttgcgccatatgtgcccccaagcgatggccaaaatgtgtacgaacagctaccttactacctgcactgtgtggtagcccttgcgcttttcgcagcaggagcaatctactacgttgtctgggcggtgttgttgcctcggattggtaagtatgtgcttgtcaaggagtccgtcgtggatgcggatggttggtctcgaagtgttttcacacgactaccacaggcagaggcagtgcgttcttagggatactgggtgtgagataaaattgggttgcttgattttggatttatgtgcttgggagatatattttgtcatggtgacttttcaccagaccttactagtaataggtaatagcagaatagaaccattctttcttcacaacacctcattaccaactgctctgtcatgctgtgacatcagaacaatgaaccgcggtgctgtatgttccagtcttctatggtagcccacccaagagaatcaattgaaactgtcatgagcccctcaaacttgctggtatattgtcttgcaaaataacagcataaaagccatttccaatcagttgtctgtcatatagaaatgagacatccactgggtgaatttgcgtgatgaaggaaagaaaagaagaagaagaaaaaaaagaacaaaaagcacaagatccactggcattgaccgccttcgcatctgccggactctgatctcatgtttttctttctttttggtgacggttggtctcaagtccgtggttcaattgatctcacatttggttctatttaattatttaatactaataccctttactcttctctttctttcctttttctcccggtattcgggttcgtggagctgatgcgccgcttctccacgcgtgtgctgctgcagcaagcaaagccaccgcttctttccgccagatctcccctccccctctttgtttccgctcgttctcctcaagcttcgattcctagatcaatcacccaacgccgctctccttcgccgctatcacagaccgccaaacgatactgttcctaccgcagaatgtgtagctcacgccgcgagacctccgggtcaaccaacgtcaagggcggccgtgaggtcctacctacaaacgtcaagccccagcattatgatttaacactagagcccgactttgagaagttcacatacgagggagcagtcactatcgagtacgtcatttatgtataatgcatactgtggtgcatagttttatatgttactaacatctacatctagcctggatgtgaccgaagacaccgatttcatcaccctcaattccaaccagatcgaaattcatagcgcaattgtctcatccaagggctcagtcgtagactccaagcccgaaatttccttcaacgaggatgaccagaccgcaaccatcaagttcggccaggctatcgctgcggggtcggatgcccagttgaagctcaccttcactggtatcctcaatgataacatggccggattctatcgatcatcatacaaggagaatggcgagactaagtacattgcatcatctcagatggagcccacggatgcccgtcgggccttcccttgtttcgacgagcctgccctcaaagccaagttcactgtgaccttggtcgcagataagagcctaacctgtttgagcaatatggatgttgatactgagaccgaggtccagggtggtgcgaagaaggctgtgaaattcaccacttcgcccctcatgtctacctatctcgttgcttttattgtcggaaagctcaaccacattgagacaaagaacttccgcgtccccatccgtgtttacgccacccccgaccaggatattgagcacggccgtttctcgttggagctggctgccaagactctagccttctacgagaaggcatttgacagtgattttcctctgccaaagatggacatggtcgccgtgcctgatttcagcgcgggagccatggagaactggggtctgatcacataccgtattgttgatgtattgctggacgagaagaacagtggcgcctctcgaaaggagcgcatcgctgagaccgtccagcacgagttggcccaccagtggtttggaaacttggtcaccatggacttctgggatggactgtggctcaacgagggttttgctacctggatgtcatggtactcttgcaacgccttctacccagagtggaaggtttggcagacttacgttatcgacaacttgcaaagtgctctttcgcttgactcgttgcgcagcagccaccccattgaggtgcctgtcaagcgtgccgatgagatcaaccagatattcgatgctatctcctactctaagggttccgctgtcctgcgcatgatctccaagtacctgggcgaagatgtcttcctccaaggtgtccgcaactacatcaagaagcacgcctacggtaacacggagaccggtgatctgtggtctgctcttgctgatgctagcggaaaacccgtgcagtcggtcatggatatctggaccaagaatgttggcttccctgtcctcagtgttacagaaaacaaggaaacttcttctattcacgtgaagcaaaaccgtttcctgcgtaccggtgacgttcgtccagaggaagatcagaccctcttccctgtcatgcttggtctgcgtacggacaagggtattgatgaagacactatgctgactgagcgcgagcgtgacttccccgttcctgacctggacttcttcaagctcaacgctgatcactctgccatcttccgcacatcatacagccccgagcgtcttaagaagctcggccaggctgctcgtgacggccgtctgagtgtcgaggaccgtgccggcatgattgccgactcgggtgccctggcagcttctggtttccagcgtacctctggtatgctttccttgctccagggcctcgatactgagtctgagtttgtcgtttggaacgagatcttgacccgtatcggcaccctgcgtgctgcttggctattcgaggacgataagacaaaggacgccctcaaggccttccagcgctcgctggttgcccccaaggcccacgaaatcggctgggagttccccgagaacgacgatcacattttgcaacagttcaaagcgctcatgttcggctctgccggtatggctgaggacccgactgtggtcaaggccgccttggacatgttcacccgcttcgctgctggcgacctctccgccatccaccccaacatccgtggtagtgttttcaccattgcgctgaagcacggtggtctcaaggagtacgaagtggtcctagatcggtctcgccatgcccagacttcggacgagaaggtcaccgccctgcgctgcctaggtgcctccgaagaccccgagcttatccaacgtactcttggccttgccatgagcgaggaggtcaagagccaggatatttatatgcctcttggcggtctccgcagccatccggctggtgtcgatagccgctggaactggctcaagtctaactgggatgagatctacaagcgtcttcctcccggtctcggcatgctgggcactgttgtccagctgaccactgccagtttctgcaccgaggcgcagttgaaggacgttgaacagttcttcgcctctaaggacactaaggtaagtgacttcaccaaggtttcacctgggttttctatccttgtaatatttactaatttgaatttttcttgcagggcttcgaccgcgctgttgagcagagcctcgactctatccgcgccaagattaactggctcaagcgtgaccgcgacgatgttgagcagtggctaagcagcaacagctatctccagagcaagctgtaagtctataaaaaagtggctgaacaatgttcataaatattttggatacacggggattctttgttttccagcgttagcagctcgaacttgccttctactgcacattatctctacgttgtcacctacggaaagcacgcgggatgtgcttctttgagctaaaatcatactccactcaattatttcatatcttgtagagtaagtgcttgtatggactacggctagctaggcaagccttgattggaatgactaactgcatggtatttggcaaccggcgccactagttagtgatgacatagaagcctccgagatcatgttgattgctaacaaaacaccccatagcgggggaaaaaacaggtggtatcgatggaaaataatacagaaaaaagagagaaatggcagagaggcctacgcccaccctccctttcctccgaacccagaactgtcctcgatcttcttcccgccaggaccgcgtgagggcttggactgcgccgcttcgtgcttgcgcagttcctcggggacacgcgatatgggtgacttgatcagcatttgtttgagatcgtacctgcataagcattagtaaatcaagaccgcaaccagatgttaaacggagaggaacgggtgtaacatacatgacatcgctatcctcgctgcccaggaaggtgatagcaacaccactctttccagcacgaccagtacgaccgacacgatgagtgtagctttcgatcgaagtcgccatgttgaagttaacgaccagtgacacatccgggacatcgatacctcttcctgcgaggtcagttgcgacgagaacgtctgttgagccgttgcgcacggaagcgagcgcggcttcacgctggtcttgggttttggaaccgtgtaaagtaaccgaggagaaaccccattgtttgatttcgcgagcgatagcgtcacagtttcgcttgatgttgacgaacacgataatcggtggacggaactcgcctgatgagaggatttcgccgaggcgcttcttgcgtttgtcttcgccggagatcatctccacacgctgctcaactgtgtcgacggcttcaccaacgccaccgatggtgataatggctggtcggcggaggtacttacgagcaatgcgctcgactgcggcaggcatagtggctgtgtacatcatggtctggcggtactggtgttggctcattgcagctgaattctcagcttcctctgtatcaggcttttcgttcgtgacggggagggcatccaggatcttgttgacaggctcttcgaacccaagatcgatcatacgatctgcttcatccataatcacgtagcagcactgactgaggactagcatgcgacgctcgatacagtcaactagacgaccaggagtggcaatgataatttcggcgccatcgcgcaggctgaatgcttgctcttcaagcgagtgaccaccgacaatactgaccacgttgaaaccaaggggttgtgtaaacttcttggcttcgatctcgatctgctgcgccaattcacgtgtgggtgctagaacaatagcgtatggaccgtcgtttttgcgccactcattctcgtcaagacgcggtagcgccgagatgtagactaaaagtgggaggaggaatgcagcggttttaccggaacctgtcacggccacaccaatcaggtcacgcgactgcatggcgatggggattgccgcgcgctgaatggctgttgggtccttatatccgacacggtcaataagctccaacaagcgctttggcaatggactctcttcccacgaacgcatgggattgggtacgctgccgcctttggtggcaatgttgaaatcctccttgaaaatacgccagtctcgctcacgcatgaggtccaagcgcttctcactccaatgcttgtcaatctgcgtgcgggtactatcctcgcgtcgccggcgttccatctccagcatttgtttggctcgcgcgctaccagcttcgtgatcgcggctcaccagtgcctctgcgtatttgcgcgcaacctcatcggcgacatcgtcaccaaagcctgccaaacgccctcggccaaagaagttggcttcctgtcggcgctggtatagggggttatagtctccgcttgtgtcttcctcggtgttccattcaaagttgaactttcggtctgcagtacgcttgcgcttcttctttgccgagaagttagatgtctggtcggctcccatgtatcggtgcttagtcaatgtagctagtgctgccgcttcgtcttcttccgtcagacgcttttcgcctttagtcttagatgggggtggcggcatatcctggtcgcgattgtgttgattgtgctgacggcctccctttcgcatgccaccaggtccagttggatgttcgtcacgcatcgctcgcggcccggtggggacatgacggaccactggttcatcccgcacattgcgaggctcttggcgcctcacagacgatggtgcagatatgagaccgttgcgatcagcgccgttggtgcgagccttggcttgccgctctgcctcaacctcttgagcccgtttctccagagcgattttctctcgttgagctttagacaagaatttaggctacaagaagatgtaaatgtgagtaaaaggcacggaatcttgcgtcatgtatcatcatcggaagaggacaggcttacttttgcagttgccgcatctgcttctttcttcttgcgtatcaagtcctccacactcagtggagtgacagccggtttctttgcgccccatcctagcttttgcttcttctgggtatcagctggaggcgggggtggcacatcatcgggaggaggtggaggagcgatgctgtctggcggcggtggaggagcggttaaatcttctggaggaggcggaggcgggctgggcaggcgctccactgagggagggcgtggagggaatccctcggcgccgttggtcatgacttgaatatgcaagagaagtgatggctaaggaaactagagacggaatttctatggaatacgataagagctagacgcgtagtcacgtgtgcatgatcacgtgcatatctactatagactccgatagagtacggagtaggtaagatggctatattctttctacgccgccagcctatataccccgagtagggcgcacgtgtgatgcgcgttatagtatatgacattctctactggcagaagtaaagcgtgtctggggccttgggatgcaaatcccactgaaatatgactctacggagtacggagtacggagtacgtggtgcagtgcagagaaaagcaggagcctagttgtcaagtaaagttctagagagagagagcctagtcagatcatcaccccaaaaatgagaagcaagttgtgagatgtttgtgcactaggagattgtatactatggtgaaccgtcctggatggttggtatttttgtgtcgttctcgtcttacctgcataaccaggctgcccatcgtgcatttccctcttcaatggctacattattagaaaggggtagaaaggattatacatgctcaaccacaatatactggaacgatctagttgttgtgcgtaagtctaacaaggctaagacaatcgtagacgaatcaattgaaaacagtttaaatgaatttcattggaaaacaagccaccttagaatacaattggtcccgaaggatccaaatctcagatcggcaaatcttatgtcaagccccaagaagggacaagacaccagtgcatctaacgaaagtgagaagaagctgtctttaagcgggggcaatatcgctagagaacaggagggaggaaaagttgcccagcacgggcaacggggatgatactacatgaaaaaagaactcacccacccaggtcaatatgccagggtaagaaacgaagataaaacaccgaaaaggcaccagcagaacttccataaacgcacccattcgtgaagaaacgtatccatagttgcagtcattggcttgagggacgtgcatatgactgttgggtttcaagcggcaccgccgttcgctgctgtctgttggtagtaggcatacgcctgtgcagccgcggcatcaggtgtgggctgcatctgaggaatcgaagcaaactgtccctctgcaggggtggggtgcaccgccacattcccgccagtccgaacagaagccacggatgaaggaccgtagatttctcgatccagggccaggtattccttcgcggcatccttggtgcctctttcgagaaggtaattcatgtaaatttgcacaagttccttgacagagtcgacttgcagaacgctcttggaccggatgtcggcaatgacctgcttgatacgttcatactgaaccgactcggtagccgcgctggtgggttgctcaatctcgaagacgagatagcttccccaaaagggtcggctgtcgaggtagtattgctgattctcgtggaaaacattgcgcgcctcgtcaggactgcccttgatcttccacaaaagccgggcccattcggcaacgagagcagcctttgtagccatttcacactctggcgaatccaattgtgtcttgtagacttcaatggccgcctcaagacctccgtggcgacgacacagatttgcgagtgagataatcgtctcaacatggctggggagatacataagaatagcgttgtggatatctttcgccacgtccacgcggtctgacacctcttcgaagtaggcatagtggagtcgaatcgtgggattggcaattgggacgtagagatacgcggcacgctgatatatgattcgaacctcttcctccttgtcaggctgagcagccatccagcgagcgtatcggaaccagaactcgtcgtaataggcacaagtgaccaggcaccgctcatacaggaattgagttcgggagtacaaaccctcgccttcctcaaagtcaagatacttcttccagttcgtcagctgagcttgatcgagctcagtgacatggaaatagggacgcttaatttccgattcgaaagtccaacgcctggtcgtctcagcctgagtgtgcgcgaaaacctccaggtggtaattgttcacgcgcgctgtaagagctttcgtcatctcttcttcagtacaggggccagcagcttcgatctcagcgcggaaagcggcgatggtctctgccgaggcgcgctcggccaaagggctaccctgcgcgatttgacggtaccgctcaaagtagcgagaatattggtgcataggaatatgaatgacacgtgcaagaattgcgaaaatcttatcgtgggcctcaagccgctcctcgaactcaatgtacttatcccagaagggatgggacaggaaatcaagaccgacactgctcgcacctcgttcgaaaagcctagttgatattaggttagcatgatgtggacacatgtgcctgatgggtgggaaaggagtgataggagtgatagaggtgataggagacaggggaaacatgagcagtgaactctgtccgtttgaaaacccaagtaatcaaatgagtgcggtagatgaagctaagggataggtgggcatcctgtgctccgtaaagggccatcgaacgagactattcattgccattcaatgcaaggtcgtaatttggtcaatcagaggagatatgcagcctgggtgagctatgggtgagaagtaaactccacttagatcaaagaagcaaagcagcgagtggtttctcacccatcgacaatgagaccgactggatattcagatatccagaaaaaaatatgtgaccggcatcacgagaactttcgcgagctgcgtcggtaacggttatagggaaagggaagaagaccatctctactctcacttactctcgaattatatcggggtcgtgcgaagtttccgccttgaacgaacagtagttcgtccagagatcaacagagggcgagatactagcaatgcctcgttcataaacctagggcgacaggattagtacaaagccatggaaaagaagaggctggcgcccagggagggtgtatgcataccatctcagcggcctcagtgccggtgagagagaactcttggtcggcatacttcttccagtatccaaagagcaatgggaacttggcaaggaaccggtcgtaggctgcgcgaacggttgtgatggcctgggggctggaattgcgcgttattccaccctcgagggcctccgcggcgcgaatcagtttttcccaagtttcgaagttgtcaggatcatcaagctgtaaaagatagacatgtcagtcgacaaggaacatgttcgtcaaatgccacatggaacacgtaccagctgggtctcgagatttctaatctccgcattctcctcttcggagcctccgtactgatagtcggccatggtcgtccagtgctgaggatgcgcgcgagaagttgatacctcggtataagacaatatggatggatgagcttgcaggtactaataagatagcagtgatggtaacaatgaagattgcgaaaggaagaaattcttggggttgagacgagacagacaagcgatagcaggtcctgatttatgcctgaggcgaaatatctttggcccgtcctggtccagggatttgagggcggtatagtccatggcgatgtggcagaaatacccgtcgacgccttcgggataaggcgcaaagaccactttatgccttgtcgcctgacaagcttggcgtgagcccgggcggtatcaactttttgaccggaacattcacaagcaacctagaaccacccgtgcacactaggatcacaaaccatcttgatccactatgtcggtttcgaagcagacgggcacattgttggaaaaccttcctcaacgcctggtaaatttcttcgctcggtatcctccacaaacccactccgcagctgtccgccgtcctgcccctgcgaacggagagggctatgtaccaatgaaggtagaatccccttacacaccagatcgcgatgccaagggtgcaccaggagagaaaaagcatggctggactccttcacgagcactcctcgtgaccagcaacgatgtccggaatccatttcttccacacaagcgattcggcaaatgggaagcaccgaaatatggactgcgccagcaagccgatctgatgaagctggccatcaagtacaatgtgggggcacttcttcctcctagtcgcaaatcacctgaattcaaggagacacgacgtgcagagcgtggtttgcaggtcaagggaactggtgttggccataaggtcaagggtcacaagtgggagcgcaccatggagtcacgtctcgaggaccgtcgcaaggcgatggaggcaatgccggagatggtcaggatgtggaagcaggttagttctctattggtccttcctgaagtggttagagcaatgctgactcggcgcaacagagaggtcatggccgcggctggagacaatggcccaagcggtaatgtggatgccccaccgccatccaccgtcgcatcgtcttctttcccttctttattttggccagtttgttcattctggcttttcaatgctctgtcgattccaacgcgaaccggatcggcacaaatacttgtaccagccatagcaggagcttgggacggagttttgtctttgaagtatactatcaaccccatctgtacaatacaatctacggtcacatcgcccaatggtacccaagaaaatcatttacatgaatccggccggtgttatctttcatcatcctcaacaccaataagaaaactcctagctgaatagtcatgttcagcttgcgagcacaagcagcagaacgggatgaaccccaagaacaaatagtcaataatagtatactatagtgcaccctacgaaggtcaccatgatgctgatcagttcagccccagttcagccttagaaacaagttagaacactacagtggcgctgttacagctttttcagcttttctttcacaattacaagattgatggtctactccgtacagcgttagcacttgactcacacgtactgacatagattgtttagtgtcattcgctcaacccatggctacgtgtttccagcccaatgtatcatcagtgaaattaggcacactgttcgtatataaatagtaataaacttgagtgggtaagctggcattgtgatgagactaaatgtagtgctttagctttagtaggatcctagacacccatgcaggttgggttgcaaatcgtgcatctaggacgctattggaacctgtgaggtataagttataatgatcaaataagttctcacaggcataggcaaatggttggttggaagtctatagcgatcaataatgtgattgtgtatcataatgtgggggcgtctaatcattagttccaatagtacatactcatgaacgtgtcggctgattcaaacatgtctccccgatgaggatgtccgtgactgtaaagggtctagtgaccctgatattatgcatagagtgcatgagcatcacaatgtagttagtggagtcgctgtagatcatcgtgtatatagtgtagaatagtgcgtgtggtatagtgacaacaatggccggcacgataaggcgctatgacaaagcaactattgccacgtccaatatatcacgggctacgtgcgaggggaatctcatctcgagcattcttcgtcacttcacatcacgccttgaaaacttgaaaacaacttataaaagccatatacctgactcttggaatgtccttattttctaaacctccgatagcctatctctttatagtggactggagatcatacccaggctagttgatttgttggtatcggtaacctccgatgagaatatagctactgctatcttatatgtggtaaggtctccccacctccttcttcaaatccatttgatattactcatttacacaactatgcgatctatttctggatcttccagatatccattatgctgattgtgctgattgtactgctagacaggaagtcccttctttcacaatttgccaccttgatttcaaacaaagtacgaagtacaacagacgttgaagtgcgtctgtccaaagttgaacttcaacaatggtggaatcaacctttcaggggtctatccattcaaactatagtcaaggttactccgccgatgtggacatcattcgagaccaggagtatcctctactaaatggtataagtgtccgtctgctatcactctattcatgctgaccactgttctactaggaacaacatacctagattatgctgggacaacaccctatgccaagtccatgatcgagtctttctcgcgtgatcttacatctaatctttttggaaaccctcattcgatgtctttgtcgtcgcagctttctacacaaagaacagaagacatccgagtccgcgtattgcgtttcttcaatgcggacccggatgagttcgaccttgtctttgtggcaaacgcaactgctggcatcaagctagttgcagactcactccgggactccgaccatcgaggattttggtatggctaccacatcgatgctcataccagtctcattggggtacgagagttggccgagatgggctaccagtgtttccaaaatgatgacgagatggaggctgagattttaaagctggctggtaaccagtccaaggcgcccagactccttgcctacccagcccaatccaatatgaacggccggcgtctgcctattcgatggtgcgagcaagtccgagccgcggcaaacgaaagtggagggaatgtatacaccctgcttgacgctgcgtcgctggtatccaccgctccacttgatctgggtccgtcttcatctgccccagacttcactgtcctcagcttttacaaaatctttgggtttcccgatttgggtgctttgattgtccgcaaaagtgctgcgcgggtctttgagcgacggaagttttttggcggaggcaccgtcgacatggtcctggccactggcgtgcaatggcatgcgaaaaaagaaacatctattcatgagcggctagaggatggtactcttccgtttcacaatatcatagctctggacacagccttagatacgcacgaacgcttattcggctcgatggcgaacatttcggcacatactgggttcctcgcaaaacaagtctatgataggctttcttcattggcacatttcaatgagaaaaaagtctgccaaatttatcaatcgcacacctcggcatatggcaacccgcatacccaaggtccgattattgcattcaatctttgcaatagtcgcggcgaatgggttcctaaaaccgaggtggaaaaactggctacggtgcaagatctgcagatacgcactgggtccgtttgtaatcctgggggaactgcctcgtcacttgggtggactggaccggagcttcgccggcattactctgcgggattacgttgtggtgataaccatgatgttcttggagggcgaccaacaggaattttgcgtgtcagtatcggtgccacgacaaatatgaaggatatagactccttgatcaacttcatagaggagttctatgtggagaagattccacccatagtcgccctggatcctctggccgaagacgatggggtcgttgctcctcatttttttgttgaaagcttagcagtattcccaatcaagagttgcggtgctttcaagatacccgaggggaaacgttgggaagtgaagaaagagggcctagcttgggatagagaatggtgtttgattcatcaagggactggtgcagccctgagtcagaaaaggtatgcgtatccaagcaaaagcatccaaatttataaactaatgatagtagatttcctcgcatgtgtcttctacgaccctcaattgatattgaaagaggagttctccgtattacttgtggtgcagtcgcggcgtcagatcaggtcagccttgagatttcacttggctgggaggacacaagtctcatctccacatccttctgtccgagctcgaccaaaaaatccacaatagtctgcggcgaccgagtttctctccatgcctacacatccccggtggtctcggcattcttctcagacttcctgggcgtgccctgtactctcgcaagattccctacaaagaccaccaaccgctattcacagatgcaacggacgcctaatacatggaagaaccgtttccgcaagctgatcatgccaggctcattcccacctgacttccctcctccggtacttgagggtggtcagagactaatcacgttatccaacgagtcgccaattctaattgtctcgcgttcatctgtcaaccgactgaatgagatcatcaaagcaaacgccaagaatggcaacaataagactgttgccgcggacgtcttccggggtaacattgtcgttgctgaacgacttgctcgccgtggggacgtggaacaaccatatgcggaggaccggtggtcatctcttcgaattggaccagatcaacttcggttcgatgctctcgatgcatgcgagcgttgtcaaatgatttgtatagatcagttcaccggtgtccgacgcgctgagccgttttcaacgcttgccaagacgcgaaacatcgatgggaaggtcaaatttggcagatattccgcactttctccagaagaactagagggctttgactcggaactaccagatcgcaggacggtgatggtaggggatgtcgttgtgcccttatatcaggatgactgagtattcgaatgctcgttttcggcattatgtgatttcggctcgtatttctttttggacttgggtgtttgatatgccattatataataatatgtaccttgtatacagctgtacgtatctcttcgcttattattttcgggaggtttgtcaatatatagaagtcttggcttcttaatctggtattcaacagttgcctagtaaacattttgaatttgatgaacgccatagtgatacccatgatagtacctaaacaaccacagtcgcagtagccttttctggggctttggtgaaaggcgccgcaaagccataggtctggtaacctttggaataatccttgccggcctcacgctctagaagatatatatcagcaactcggcccttaaacatttgacattccaaagaaaactcaccatgctcaggcgggaacatctccatgcgatgcttgtagtattgctcccgaagatcctccccgtcactcctcgagtgaaaggtagcataaaggctcgatcgactcttatcggtcttgttctcagcagagcgatgggcgagatgcgacccaaagatcagcatatcacccatttcaagtggaataggagtccatgggtgcgagtgctcccattcaggcttgattcgaccacctgccgcaaattcaatttgcattttgtgggacccgggcacaacctccagacatccgttttcaggcgtcgcagcgtcaatggctatgttggcggtgacatgttcaatgcgaccgatgtggtcgtaggctggtgcatcgaggtgcgcctggaagccgtttccctgtggctgcttgtagttgatcttctccttgaagagcaacatatcctacagttaatagcttgatgttagtatgatctcctgatagagcttcggtcttgtggaaatgaacatacatcgcctgagactgccttcagaatctccgccagctgctcgccgcagactagtgacttgaactgagggtggtattcaatgaacctttccgtgcgcatcagctggcgttcgcccttgatgttgatttcatcgtaaggcatccatttgcccttgacacgaggccaggcctggatttcttgagtccatcgcttgagttccgtaggatcaacgagttcatgctcgtcggcgcgtaggaggaggtaaccattctcatggtaaaaagctatttgttcaggtgtaagaggcgacatctttgagtaatttgttcgaaaccaccgaagtaggcagataatgagatgatcgaagtgagaatgcagtaaacctacgagcttttaatagtttttcgaaacgcatcgacttctgttgttcaacagcggggccattccgataattcggccttcgattgccctaggaattgacccgtgggccatttctcaattagttctagattgcgttggatgcgacttcagtgaaggtgttcgtcccgatgccaaccagaaacccatgggatgccgcacagaccaacgggcttcgtgccgagacgaatgcgattcgctcatccacgaatctttgagaatatcgtgagttattggaggggcaagtgagaagatcaccatgtgcacgtgctgagacggacttcgtgcctttattcgcgatttagcccaatgctacaaggacttctaatatgtcaccacaccctatgtacgaccaagggatctatttaagaccatcaacagaccatttcttgaggaataaccaaaagctttcatcaaaatgaacatgaaaatgactatttccaagactgagcaacctcttgactcggtcgaggaacacactcgagcaacgatcaaaacattgttccaatttctgcatgcacagggccagggtgactacctcggcgagcaagtaactcaactggaacactcgctacagtgtgcatatcttgccacccagtccccggagcatggaaacgaccctgaggtcatcgtggctgcacttttgcacgatgtcgggcgattcatccccgcggccgagaagatggagaaaatgatcactcccgacggccagtatctcggaagacaaagccatgaagctctgggggagttctacctgcgccagattggtttcagtgagaaggtgtgcaagctggttggtgcgcatgtaatggctaagcgctatttggtcgcgacggatcaatgctattatgatgcattgagtgagaccagtaagcggacattgaagttccaggtaggtcacctttcccttattacattctcaattttaggagtatactaatgacaattagggtggcgggtacaataacgagcagatccaggaggcgcaaaaggatcctctgcttgaggcaaagctttccgtcagacgatgggatgatctcgcgaaaaagccgaattggaaagtccctgatctggaagcctatgaggaaattgcctatcagtgtcttattggtgagtgtgattgcgatagcgacctctaacaacccaatatatatactaaacatatacagactcccggtcgaagttcaccctacattcgaaagaatatcacctgccaacacagcccacagtggtgatctgtgttgatggcttcgatccggaatacttgaagtctggtattgagagaggtcttctgccgactttcaagaaattccttgacaacgggttccatgccactgctaagagttgcatgccctcattcaccaacccgaacaatgtatccatcattacaggcgtgccaccatccatacatggaattgccggaaacttcttcttggaccgagaaacaggagagaccaagatggtcaccgacgactccctacttcgtggctcaacaatactggagcagatgttccggcgtggtgtacgagtgtcagccatcaccgccaaagacaaactgcgcaaaatccttgcccacggcttaaagggagccatttgcttttcttcggaaaaggcagcggattgcactctggacgagaacgggatttccgatgtggaaaagtggctcggtcagcctgcacctagccaatattcgggcgatttgtctttgtttgtgcttgacgcaggcatcaaactgctgcaggagaagagatcggacattttgtacttgacattgtccgattacatccagcacaagtatgaacctggcagcaaggaggctgacaatttcatgggagcaattgacgagcgtttgcagagtcttgcagctctagctcctgtcatcggtgtaactggtgaccatggtatgagccaaaagtcaaatgagctgggagagcccaacgttctcttcctggaggaagttctcaatgccgagtttgggccgaatgcctctagggttatctgccccatcacggatccattcgttcgacaccatggtgcactcgggtcctttgtgcgcgtctatctcaaagacatcacgcaactcggatcgatgatttcattctgcgagtcactcccagatgtcgaggttgctctcagcggcgaagatgccgccccaagatatgatatgcctttggaccgggagggtgatattgtggttatttccaaaccgcatgccgtaattggcagctgcaaagcgaatcatgatctctcaaacttgaaagaccacccgttacggtcgcatggaggcctaagcgagcaagagatcccattgattatgtcaaagccggcaaacaatgggagcaaggctaaggcgaaggactggagaaactatgacgtttttgatcttgtgctcaactgggcaatctgatatttatctatctcgatgcccgagatcaaagaggaggttccatcgatgtattataatgtagccaccaatcgtcaatatcagggaagatagtttgaaaatcaaagcttgccatgttttccatccaaattgcatcaaagactgggggttgttcctgggcaggagacgtacgatacattgtttcgtgggctgtgtgagcggacatttggcatctactcgacaaacgttccaagccctcgctgatgaccacaaggagatggtgtttatgcatagactgagtgatatcccgaagggcagccacggtgtcagtgaccagtgaaaggatcttggtcgtatcaattctgaccatgaaggcatacttcgtagcaactttgaggagaaagacaacggcgaaggcgagcatagtatcgaaatataaaggaagcccattcatgaatgatcgaaattcggcatcagaaacaatcatccgaagaattgacatagctgacaatacgccggaattggcgatctcctccaattcaggtgacatgtattgaggtgagctctctgatatcggtacgccacgaaaggcgtgtgagcaaaggtatagctttgcaaaatgatagtgaaaacccacgcccttttgcggatagttcccgacattctgatttgctttgaagctttcgctccaatctgcaaaccaggtatccaaagagatagaacatcgacgcagttggggcagagtctgcggtgcaataggggtatcaacatctaccccgaaggtgtcgaagactcgacccaggattgaccattccttgacctggctgattagtctagcatcatcttctgtggcgtgttcagtttctagtattcgactagccgactcaattataaacccttctctggacatcggaggtcgaccgtaggcgatcgaaaagtggtggtcgcatacatagacgagatagtatagtcgagcttgaagatagccatcgcggtctcctttgagggctttgtagataccactatgaagattaatgtccgatgcaatgcggacggctagttccattagctttaatccaccacaagattgcagccacatcacataccattcccgatcaaggcccaagaaagttcatgcaaccaaaacgcaccaacgcacaggccacggatgtcatcttcattcatatgccttgagaaagtttgggccgcgacaacgttcttgtattcaccgtagcaagtttcaaagagatgaccgagggaatgcgaatgcaaagcagccacggtacaaacagccgccgtcaatagtggggatgcgattcgaaccgagtccaaactaatatggtcgccaagaatacgatagagaaaatgatcaagtctgagatggtatgtttcgaacaacgaaacggcgtcgcgtagtaaaataagtcccgtagatatcaagtctggacgacgggaagttgatggattgtttggtagacctgcctttccactttctgagacgcaggaggctgggatagaagctgggccacctcggggatccattatcacttcccatgtctgcggtggctcatggtgctcatttggctgagacggttgacttgaggtggagatttcccccgcgataactttctcattaatagtctcaaccggtgggctcaaagaattatcttgtatttcgggcgcagcttgcacagtttgcaaagcttgaaactcgggcatgtcaactttggcagcaatctttgcaacagcctcttctagccgccgcatcttttgcaccacggcccctttccatctagatactgtcaggaaatgccaatgcaaacgattagtctgtacttacgtgacatcgtcttctagtaatgtctgcaagcttcggttcacgctgcaagggagacctctcttcttgcaccgcgagcatggcatctgaccctcccccatatgacatttgacctttccctgtcagttacttgctttgtcatctacttcaagaggaccaaccttttgttttcgacatgctacacaagcagtaatcttgcgagtaatatcggggggctttcgatcgccgaatgattctcgcaaagcacttacgggcggcggagacggtagttcgatgtccataatgagtgcctgaattgaggttgccgcggagtgataatgttctcgactttgcagtgtttgcatcagatccgataaattcttacaaagcaccaaccagagttcagacaattcagcatgacctttccgcgtccgaataatgttgcgcacttcgcaccgaagatatacttacgggggaaacgggggaccagctggcgggataaggccggatccacgtggggtcgatgggaaatcctgactggcctcaccgcacggtctattttagctgtgtatcccccgtggcagcttgcacgttgctcattgcatcttgcgcttattcatgacgactgctatggccgataggaagtatatcgcagaaaagctaccggtggttctctccgagatgctaatgtcttggctatacctcctattatacgtgatgtgaaagaagtatataacatcaccattcgccaaattaacaatgtgtgcaacgcaagggaatcgcattttgtttcctcgatcacttctactctccttaacctcaagaatcatttgattcgttccaatggcatcgttcggagccaaattgaggtttgtagccactgcaggcgttggattcttcgcagatggctatcttaacctgacaattggacttggtgagtggcttcaattaatcaatgaggccgaagactaatgttacacagtggtcccaattctgggttacctatacttccaagatgacaaggtaccgtcagtcgacagcgacatcatgaaaggtggtctgagcctgggaatggtggttggccagcttctttttggaattctgagtgatgtttgtggtcgccacaccgtttacggcaaagaactcctcctcaccatatttggaaccctattggtagtcttgttgccttggaacgggatgtcggcccagtctgtgacggcatgggttgcaatttttcgtgtcgtgaccggagttggaattggtgctggtaagtctttttcctttggaatagaagcatggatctaactcgagaaagattatccattgtcttcatctttggcggcagaaaaatcaccgtttggctcccgtgctattcaagtgttgactgtcttttcgaatatcggcctcggcaatatttcagccagcattgtgtttctgatcttgctcaaggcattcaaaggggcgatagccaacaacataagccatctcgaatgggtctggcgtttgctattgggcattggaattgtgccagcgttgttcactctttatgcccggctaacgatcacggagacaacaccttacaagcaatgtgagagtgcctcggtcttgtgctttgaagatagctaatactgtttagatgtctgcgatgacgctgccgggcagaaacgcacattcaagaagcagtgggaagaatttcgcgagtacttcagtcactggcaacatgccaaagtgctgttcgcaacatcagcctcctggttcttgtagtaagttaggtggacttggaaaaaggaaaagccgcaaactaacgcacacagcgacatcgcatactacggtatcaatctcaaccagagcattatcctgacaagaatcggttatgccaagggagcaacaccatggatcaccctgtaccacaccgctgtgggcaatataatcatccaggtagcagggtatctccccggattctacgtcggaatattccttcctgattgcatcggtcgtgtgcgccaacaattctggaccagtatcatggtgtgtatactttatgccatatgggctggaatcagcacacagagcgcaaacaccccgacagctggcttgatggttatctttgccctctcgcagtttttaatgacggttggtcccaactgcacgacgttcctgcttcccgccgaagtgttcccaacacgtgttcgaggcacagcacacggcatatctgctgcttctggaaaatgcggtgcaattctaactgcatttgctttcggcactgttgaagatgcaatcggcttggagggcgtccttggtttgttctcggggatcatgctgctcactgctcttgtaaccttgctgatacccgagaccaagaatcatactcttgagggcattgagaacaatgggctctatagaacaagcggagctgtcaccgaccttccaaattctagttgtattacctatgtcaacgttgaagctgggaacggggaggcaaagaccagctttggagatgatcaagttaagaagttagctgtatagacaaatcaagtgactgtggtcctatatcaccgctataagaaaggaatgaatcggttcattatttcaagagcaaatcaatctcattgagctatcataggcatagaagaatggctatgaatacaagttgtactattcgtcctcgatggcctcgtggcctgtgacatgtcgtaagtatgcttttaaccagtcattcttgtgtttcgctgtatttcatccagtctctgtgcagcggcaccactgttgaagttggcaaagctgaacgttgagatagctttcttcaaatcaaagcaagagctccgtcacaaaattgaagtcttttagcccaagaacaaggtctccctcccctggacctaggggacgatcctggattacaacgaaggggaagaccatggggttcccatccataacatttggtattcccgcaaccggttttggtgttatattcacatgataggcacaataaggttgctgaagttatgccggctgtctggttagtagtggtatgtttggggtttgtgtctggagggaccagatgtaattccaagttagcgggcggggagcaccgcttagggccaactgccactgctcgaaagagatacagtcatccctaagaagaatgagaacgaccattctaatgtcgcccctagaatctgcgaaccatttccgtgtatcttagcgaagtcggccaagcgattccataacacccgtttcaataataagtatagggtagccaaagttttaaatcggccgagtgtaacgagaggggggtataaagccattatctgcttctttacccttcctaataccagatcggtaagttatcgatccgatctaagccgatccttccctagggatacctatggccttataataatcgcgatttatttcaacgaacttatctgtggcaatgtgatgttcgattctagggacgaccttgataaggccggtagagccctcccattgaaatcgaaatgcgattcccccaagaccgcggtggtcgcttgtgggtgcttcgattaccggtggtgacagaccgagcaccacaatcactggttgccgtgttgatgctcctcaaaccattcaaaaatgtgctgtgcctctagtcgcagtctcgtcagttctgaggagactacatgccctgcaggcaggtcagacattagtgtgggggcgggatccgacttcgtctgctcattttacgcctttgccgttagcaaagttaaaagaaaggggaggagatagttgaaaagacaggtaagaagacatgtaaaaagaccactcaaaagacacaacaaggccgcatgagcgattattccctgcgacagggagtatggttaccgacagccctgcctgtgagaaaggatgagagcaaggtccttcactgagagtagttgttagagaggagaacaagaaaattgaagatgttagggatgccttacatagctatagaggtggatccatggatcacatggccgcttagtcatcctactctggatccccactacaataacaatagttatgatcgttcattgtgaatagcaaaacatcccgtcttctccaagcgcccggacaagccgaacaattgatgaaaaggagttcgcgtcgatcgggggtagtgtaagcccaatgacactgtgcaacgaggcatgcgcaagcacaggggccaagtcgcgggatccaaaaataggaataatcaaagtgtttcctggacggaaactttcagagattaaactgaaaagaacagatactacacttgatctaagccaataggcaaagagagctgaagaagaaagaaaagaagaagagattctgggggcgcgggcgggtatatatacccaattttggtcacgtgcctttggttcaaggcggtatgtgtcttgggcagtacctattagttaatctggtctgctagctcattacagcaggcggtgatggccggtgaaattctgggggcagggacaccttcttatagttatcctgagggcggtcggcttctgccactatttacaaatgagacaaacagcgacatatgctcgcttaattaaacatgtaaagggtaacgtgatgataaccacaatcactgttgatatcagggtgatactatgcactgcacttgctatagacaatactataggcggtcaaacttgcaaaatgtcaactggcattggcgtgttttgattggctcgatagtctaccccgcctatgggcccgcttaatatggtgcatcacctgatgacctcagaaggattacctggatttcacatttcgtatattggcccttatctttaacctcaaattcccgaaaatttagacatggcagaccacttacattctcgcgaaggatctgatgcttccctcaacaatgcatcgattgcttctccacgatccagcaccgaatctcgctctcgaaatccacttcgcatttcagcaaaccaccagcatagacaaagcttgagcgagtcgcttcgcggcccgccaggttccccccgtgcacgccggcagccatcactcccacagtcggccatccagagccttatcgataatccaccgccacccaaggctagcaaccctgcctttgttggtcgtgattggagagagatatcagttggggagctggtcagcccgggcgacctgaagtttgtcgagcttgatacaggcattgaagaggcgacgaacgtgagtacatcacataggcagcattccctgtcctgactaacatgctcgtccaactagattttgattgattcaggtggcgctgtgctgttgattcgcgagacacccgagtccacttctgccgtgggcacattcgactatgccgatctcaattcctatctccttttagcagcgggcctgacacatccggacgaagcacatcaagcgtcatatgacgagctagccaagaaagcccacaacggcgtgcccattccattaagagatgtgaagaagttcggtatggagaaggagccgctgatcaagctgccagcgtcggccaatgtcttggccgcggttgagatctttggtggtggtgttcaccgggttgtggttgtcaatgagtcaaatgaccaagaagtggtcgggattttcagccagttccgactggtcaaattcctctgggaaaatcgccgcagtttcccgattattgaagagctctacccgagggctctgaatgagctagttattggatctcaggaagtgatctccatcaagtgagttgttttggtgatctttagcgctgtctaaccgctaattcgtaattctcagtggtgataaacccctctctgatgctctccatgtgatgaacaatgagggtatgtcctcgatcgcggtggttgataactacttgaacgtgcttgggaatatctccacggcggatgtcaaggtatgtgacgagccatcttaactggcaaagtttactcaccatttcgtagctcttgacccgatcatcttcattgccacttctgcataacacctgtacccactttatctcgattattctatctacacgggggttgattgagggtaaagactcattcccggtcttccacgtcaatcctggatcgacactcgctcacacagtcgcaaagatcgtggcaactcgatcgcatcggtaactactgcaaacttgagatataaacacaagatgtactgactgctttagactctgggtgaccgatccgttatctcccacctcatcaggaccgccaactccatcgcaatcttccgtacacctccctctttccaacagtatcagcccagctaccggaggtactgcaaattcagaatcttctgaagaagctgtgacatcttatgcacagccctctcaatatgccgcccctcacctaccacctcctaacccacccttcacgtacccagccgtggcggtctcagtgccatcacccatctcgcattctattccctcgtccgccctagacggagcccgagtgtccggacgcctcgccggagtggtcagcttgactgacatcctgaacctgcatgcccgagccagcgggctgaacccggccgacccggccgactctcgtagccgccgccgacgcagtagttcgtcgagccagagtgtccgccgcagcggtgacattggccgggagcttttcagtcgtggtggcatgtaagagcatacactacgttttaacttgggctctactgcaaagcatgttctcagtactgtatttgaacccgatatacgcaatcgctccgacgtgcttctgttaccaagcctaattctattcagcccaactagatatgcatatttccatgttgtcacacttcatcagccatacaagataggaggcaagcggatggacctttgaacgttgcctagcctgtcattatcgtctttagcaatggatattatttccattgtggatcagcattacaccaaacaacttgaattgactatctccctacgtagttcctcacttgcattgtagactcgaatctcgattatcacgtctgattcgagtccccgccataccagataaaccagatgagccagcatccatatcaagtcaggatcaacaatcatcgggaaaagccgaccaaacccacctctccacggcgatcaggcaaatcctccatcgtacggacaaagtcgaatactatccactaatcccatacccgccatcacccggagaaccatttccggaatccacaacgcagtcttattgtgtcccatccagaactgtccagcggcgcgaacaccaccacacacgcaatgcacaaccagcagcaacggagaagaccgagtccagaccggcgtgcttattggtcctcgtatgccgtcatttaaggcatttcgcattggattactgtgtttgattatgattcgggtacagacgtcgatcagctggaggtctcgaattatgagtggatcggatgtaagcgagggtgcattttccgcttctcactggcccgtcagatttgagctacccatcctgtctggaaggtgacaggtctggaatcgccggattgagggggcttggactaactagatggtgttgcttactgtttggttgagatattgataagtctcaagtatgcagcaccaaggaacagtgataccgatatctccttgtgagattacacgtcctacgataaaaccaaagccagggtctgtactaactcaagaaggaatgagcttagaccaaatcccgaagatcctcgactcgctaaaatctggggatgatgttctcccacttgtcgtggtggcaacaccacatccacagtcagctcttggtctcgtctggactcctggagccactgatgctccactgtgcaccgagagatccggactgggcgctgatcatggagacacaccctggggaatttccgggtaaattggggttgtgattcggggatattttaggactttctgttggttgagaaggactggaaggtatctgtctaggtgatttagagaggatgttgcatgatcatggccaggtccaggtctcaagttgacatgattcatagctgtccatgaggtacagtatggatatagtttagtaagaaatgactcaatccaactaattgcacacgacgatagcgccatcccaaacgaaccaatctagactccatgtctgattggcctcaacagaagaagaacattcagtcgctagaaatcacctcaaacgtagtacgtaagccgcaacaagagcgaacagacgaggcaagtccagaatgcccgactcacgaatcattccccccagagctatcacaccggggaggcgtctatcaccaacccatgggcctatcatctaccttggaagccaatccccccatcccaatctgacaatctgacaggccacccactggatccgcaagccaccaacccagcgtcaaacgcaagggaaaaagtaaccgccaatcatgctcccacacgtgtgcacgggccagcgttgcagtcccatccagctggaaaccgacagtaagcccgtgggtgggtgctggacctggccccgttgaagctgcacggagatcccccctttgctccaccaggcgagacgagttagagttctatttgctgggtgtgccgatgatacccatgtctcgaccgctggtacgcggccctcggacttgggtttcggccgtggtagaggtgctgattgactctatactatccatgggtcagtgcggacgctagtttgctgttggccaattaacgtccggacttggcttcaaggctgggcacagctgcaaccttaaccccgcaatctgggattctgcaggtgattcttttcttttcttttcttttttttttttggtcgtgtagtcggttacatactttgagggattgcgggtcttggatttgagatctgggtataggaaatatattcaagttgttctatctaccactcatagtacgtagatagcattgatatgggctgacaagacaaacgcatcaccctgataaaacagaagtagaaaacgataagtcgatcctgcacgatcgccgttgatccgtaatcccgggaacgcaggggcgggtaggacagcagccctggagccaattccgcagggcacggacactggcactggcacggggcacggagcacgggacacttggattttcaatttcaatttcagtttcaattcttcagcacgaaattcaaatcccacccgaggagctaataactccataactgcgcggaaaaatacaggatatttaactattaggccataccaaaaatcaacatattctaatcagagaccccatccgctctgtttcttgttttgacagaaacccgcggggtcggaaacactcctgagatagcacacggtaactgtgacgagacgcgagatcaaggaaattgcaatgacagagatagagaaagcaggattcccttttcaaaagtacctatttctatctagcatgcaaggcctggcctgagatatgctagataatggtccagggtccagggtgggaaacagggaatcggggatactgtattgtattgtaattttggtaataatggaagaattgctgccatgataagtgagtagtattaggatactgtatcacactctacgctagcacagttgtatgtactcctatatcccgtttaaccctattccatgaatagctggtcatgagtgacagcatagaaattaagtcgaggggttccacagttgaggatggtctgatcgctggaatgactttaggtacgtaggcgagaacctgggtgggtttgtgttggacccacgtagcagggctagaggattactacagagtaccaagggtgcggttggtggagttgggatgcggcattttcaagggagaaagtgcgtggacacaagagttaggatttagggaaagctaactaacaccagacgcaattctggttaaggataaacgccagaagtcattcctatgtaatgtgggactggggaaagctatagctacagctctactggcacggcccgacggagcatagagtctgggactaggtttatcgcagaaaagaaaatgagatgccaataatcgcgcagttataagggatggtggagtagccccggattaggatgcggacttggcgaggttgtttgcggatggatgcaacttaggtatagaattgggggaattagggaaattagggaaattttattatgaagaagatcagtggatggattttggctcatgtcacattgaagtatagtaaaggaaaatttatgaaaagaaagagcaatcgatacatacagacatcaaccctgactccagttcaggatattagatgtaagatacgagaagatataaaaaaaggtacagcaaatgtgcaaagccacccaatatacagacccaactccgaaagacccaagagaaaataagtacctaggtatcaggtatcatagatcataataggcatgatagacagatgaggttaacaagagacgctggtgaaatcatcaagagcgagaagatcgtcaaaagcaaaaggctgatcacggtcggaaagcggaacattcgagttacccaagtggaacgcaaactgactgaaatccgtgaaatcaggatccatctcctcatgggagaccataatgccatcactgttgaacttcgcaccgggcgacatcgtagcatgcgccgtcggcgacagcggggtgttgggagtgggacagaagtccggagtggactgagtgcccgctgggagggcctcgatcctgggagagctgagactggagggagccacctgcgagtgggaaaggttcgtggtctgagtaagcagattgagtttgtgcaagttgttcgatggatgggactggccgcgcgaatgaccgtgggtaggatggtggccagtggggcctgagatggatgctgagggaatcggtggagccgtgtgttgcagaggcaactctggtgcggacgcaaggcgatcccggaactgatgcatttgggtcgctgtgtcaggcatttgagcctgctgcatcatttgctgctgccacatctgcacggcctgcgcgtcggtgggcgtttgtgcaggggttgggttctgctgttgcatgggcgcccatgcgggtacttgggagttccagcccggtgcggaggcttgttggctcatgtaggctggcatctgcccagactggttgcctgtcggtgcagagaacatgtcggagtatggcgtctgggaaccgctcatgctggccatgtaggactgggcactcgggtcgtacgacgccgtaggtgataggacatagccatcacccgtgggcattgggcttgccattgagcctgggccctgggagaaggaggagcgaatattcgacagatccaagctcatcttccgtggaccgccattgactccattgagtgatggccgcggggtcatatggcttgctcggcggctgtggatagaggagttgttgaattgagcgcgtgctgcaaaggcggccagtagatggtttttgaactgctcttcaatttgctcgttttggcgttgcagcatgagaatccgtttttcttgataccgctcatcgacctcttcatacatggcctctttctccacgatatccttggtgatgtgaaaggccttgcccgtgcgcttcttatgcaacatagaagcccggttggcagactccagccgagcatctaagctgcgatccttgcgccgtgaggcggcgataaaggctctggggaatggttagggtgcacgttcggcccctccgtgatacgagttacatacctctcctggttctcctcccgcgaacgggggataggcgtaatatcctggtcgagatctggcaggggcatcctggacatggtacctggtagaggaggtggatttatgcaggaaagagtgttatcgcctggccaccggagaagagggggacggtaagttaaataccaaaaaggctgaggggaaacccgtcagcgttaaacccaagctaagggccagaaccacggatccgagccgatcatagtttgggcgcttggaaaacttacggccgctcggtccatggttgccccgtccctctcctctaggctagtctgctcgagagcgccactacggaggagccaaatacgaatgggctagatatggtgccactcatggcccctcttcccggagactatttcctgcttttccaggtaaataatatgcagcataccagatgtgcagttagcaaattatttttcctttccagattagccctgaagggtctagaccattcgctgtgaagtggggcgttactctactccagacagatcccgatagatgtgttctgatagatgtgactctatcggggatcactgcagatcactttcctgaagcgtagactgtcatctccagggcgaaggttttttttttgagtgtcttcgacatcacgagaatcataccacgtgattggccggattaggaaggcttcaaaagaaacctgaaattcaaggctacacctaccttggagaacatcagatctatgataaggttacagtacttcggataacaccgattacttcttggcgagtataaggcaattgctattgaccgttgttattgacgcttgagaaggaaacacctggttcaggatctggatagtaccaagcgaaaattacgaggtttccgttgaatatgaagttctccctcttccttcctaaatggggacttccttggcgtatctcggcgcacctgcagggctaggcgggttgccttaggctctagggttcgcacatactactactactactactactactactactactactactacttctactactactactattactactactactcttactactactactcttactactactactcttactactacctgtactccgtactccgtacttacctagtaacgtagtcagcatttccaattagcgtagcgtaaccactatgtgaccctaatagccgccaatgcatcaactgccggcatactcccgaaagataactttctcaccagcaactcatataggaaggaggtcttaaatcaaccataattgggtacaaaatacctcgcttaagtcaattgtcgcgaggcgtagaatcatccatggatattagcacaaaccaaagtacgaaaggcataaaccaaacagtcataccagttaaacatcatacatgatgttccgagacatgccaattgatcagtcaattgatcaccgtcactagctgaaacatcctacacgacacaagatatgggcttattcaatccctgctcaccagagcatctcccgatccctattccttcttttggcctcggacatatgtattctgccggatctaccctcatctcatagacagcgacgccatatttaaagcccacggtatcgggggattcgccaccggtctaaagccgagttacctaagctcacccggccgagactaggccgcttcgagcccctccagatgtcctccccgatgtcgccactgcacgcacaatccgatatcatccgaccgcattatttctctacgcgaaagtcctcgaaagccctagtttgtctgactctgattggcatgacacttcacgaattggacttttatcgttagcgattaactacaacgtaactagtggggtactcggcgatcaccccgctgatcgtccgtatccatgtctaacggacagagtacaggatgtgtatgtacgtacacgtatccagatcatcgcgacaaagcacacatccatgcattggcatgaaatcaacatgggagatcggaattaaccctcaggatcaatagccaatccccagattccaccagaaggctagtcgagatctcggagaacgatcggggtcagaacctgctccataggaaccccacactagcagccacaatataaaccgacgacagctcatgccgcacacttccgccaggacgagtgggagggcgccgcgctgagatctgcaggcatacatgcctagaagggaatctgtggctggctatatcatggtggcggtggcgcgagcgctggagctatgcagggggaatctcggcggatttgattttctgtggtttcatggttttttctttgattcggggtgcatacgacggacgtgtttggcacatgggtttttagcgttagggttgattcttcaaggtcggtcttcggtggttactcggttaggaccgtaccgtcactctgggacacttgatgttgtaggacggagtatagcaaggacatcgtgctctcatggacgacagggattggttcattggtctgttcctactaccttcatatgtgcatcattgcgaacaatcagtaagtctaccaaaagcacatcgtcccctcgccacgaaagaaaaccattgcaaatgaaatcttgtttataaacagcatgaataggtaaaagacgctaagttctcaatgagtgcaaagccaagggaaaaggagagcaaacaaaggtagagaaggcccaaatcagccgatgctgctgcgcggattagaccattcaacggggtgaatgctagattgtccgctcaggcaaactctcatcagacagacctggagggaaacacaacagcagaataaagttatgggatcgccatggcttcttacgcgattcccagcggcggcaccatcccctgttcctctcgggcctcgcctccaagcttgtaagacaccttgaatcgaatcttgaccgagttgcccttcccagcatcaactccgtcaatgagcatctcctgttggacaccattttgctgctggggtgcaatatctcggcctgattgcggccgaagctgtagcgtgtaggactaattcatcgtcagcaaactcatccaaaactggactgcgttagtagcaaatagcttaccttctccacagcgacctggaaatggagatctccaatacgctgactagttgtgtttgaaaatatagctacaacgtggatctggcgtggctgcgtcggcacccggcgcgcagcgaagtcaacttggagctgagagttaaggacttgaatcttattggtcgatggaagcgcattgctcgctggcaatgcggatgcgaaatcccactcatcatcttccactggagcggcctgccgcggcggttgaggagacggactcgtgcctcccatcaggtcaagcaatgacgatggagcgggagcaggttggctttgcgccggtggttgaaagggaccagatgctgcccgtgggctagcagagacgagcgatgcaaatggatcagccgctggtggcggggtcgctctggactgggcttggggcgagacccccatgacgggcgtgggagattgagagacaggtcgcgaactgttcagagaagcaaggatatcataattgggtttgaaggctgttggcgcatgctgctgaggttgtgatggaacaggcggcgttgggcttgctggcatggacgcgaagttcactttaatattggtcagtgatggtgctttggggtatattgcgccgaggtacttactggaaggtccgagagagataccacctccgggggagggagtttgtccgcctaatgaaagaccgagtagatcattctccaaggagctcccaccgtgggatggcccggcctcgttaccgttggagctgggttcaggctccgggtcgaaatcgataagagagagctcgttgtttgcatttgttgaaactccagtcgtggtgcccagtgtacccttgggaatctgagatgcagcatccagatcacctttcttaactagcttataccgctcgattgtgcgatgtatgctgtcgttgatctccaatagcttgtggacggcctcgggatcatccgattcttcctcgcacattttctggattttggggtgagcgctttgcaaagcactcgcaagttcctggtacaatcgtcagagacctatcaaccggcaaacaacacacgggacgttttatcacctacctcgaaaacttcgccttctgggagaggttccccgggcttttgattctgcagcatctcttccagaatcttggctttttgttgcaccttaacaacctcctccgcagcctttgctcgataatcggttttatgccgattgtcgaatcctgccataaccttcatgagccggttcgcttcctgtagatcggcgggagtgcctctccgaatcaactcctggagtttggcagactgcgcttccctctcttcctcttccatctcatctgctgagcggaggttctagccaacgttaatttgactccgaaaataccatgtgggggccacatacatcacttggattcaagaccgcagcatcttctcgacggacctccgggaacatatatcccttataaagcaacagacggtgcatgtcccgaatgaagcctaggtcatccttatagcgcgatgtctggcagatagtctggcgccactcctcgatcgactccaaaatgcggtgttggaccctggagggccgtatgggtggccgctcggggaacctgcgaaccaattcattcagaaactcctttgtaccgatttggagatggaatggatatccgcagttcttgacggcaatatcgagtagctagaaaccgcggttgtcagtctcccccgcctcggctgtcacttgagctcacgtaccgccaacgccaacaatgcgacattctgattccgggaattgatgagatgaactatatccaatgcggcttctcgcggcctgagaagtgaatccatgagtgtgagccatacaacattgggtgtttcgcttacgcattgcctttcttggagttgattagatccgcaacttcaaggttcagggccaggttcggttcgtagttttgaggatcgcaggcatttcctgtagataagtctcagtatgaatcatttgtgccacatttatttcaacactgaactcacggattgcccgctgcaacggcgaagcgcctggctcagcgtagaccccgaagcggtccctggccgccattcgtgcagatgcagcctccaggatggcggtggacgaggaactaggagaggaagtgtattagccggataaagagggaggtactggaaagtacaagattctagaggagatgtgtacagtcgcgaacggggatgcgggcggagaacccgtttaggctgcacgtgtggcgcttgtgcttggccttgatcttttttttcaaccactacatttaccaccacggaatactccaagatactccaagcagagtatttgaaaatcctactagatttcgacctcgtcattcaccatggtccgccacaaaaaagataacttcgcgcgaggaggcaagaaattcaacaacccccgcccccgagtgccccgcggtgatgaagaagttgagggcgcaacctcctcaaggcctccttacaaggctgcctgctgggatatgggacactgtgatcctaagcgatgctcggggaagcgattgatgaggctcggtctaatgcgggagcttcacattggccagcggcaccccggcgtaatcgtctcgtatgtttcgcagtttcgcagtgcttttttggtcctcttagcttgcatgctgacgattgactagtccaaatgccaagcgaattatctctcccgcagacaaggatattatggagcagcacggtgctgccgtggtcgaatgctcttgggtgcgagtcaaggaagtgccctggtcacggattggcggaaaatgcgaacgacttcgtatgtgataagaattgggcaatgatgaactggattaatgggatgcttactatacatagttccctaccttatcgccgccaacacggttaactatggcaaaccatggcgtctgaactgcgtcgaagcgctcgccgcttgcttcgccatctgcggtcgcttagaatgggccgaagatctactcagacatttcagctatgggccaactttcttggaaattaatcaagaacttctggcgcgctatgccgcctgcgaaacagaagaggatgtgaagaggacggaagaggaatggctaaccaagatcgaacgggaatacgaagatagtcgcgtcgatggaggtgatgatgtttggactaaaggaaacactaatcgtctacccgcacgaactgatgaggacgacgacgacgaaagtggagacgaagatgacgaaaatgcgggcagtgacgaagaggaagatgaggacaaggatccatttgcgatttccgatgactccgaagacgaagagcaaatggccgagattcgtcgcaagattctcaattctaaagcgttcaaggatccggaagaggaggaaaggcagcagccggagaaaattactcggccggagcagctatatgtcgactcggatgctgagtccggctcagaaggaagcgaggacgaggcatttgacaatatcattaatgcgacgacggtcactgaccgcacgggaatcaaagcgattcagcagcggaaaggaagcgagactgtctctgcctcgttctctcgggcggagatttctgccccgaagaaatggtgaaagtgaggcttattgtacatcaattgcccatccactcaacgggccgttagcttcttgctctgagagctagcaccattttctggagtctcttggtggtttctcccctggcaacacacatagacagctttattgctttgcgagtcctgccatagcaagtgcacttgattcttcaaattgagtccggcattctgctgtgtagtattgccacttgctatctcgtcattggggtggtttcatttctctgaaggtacgcctcggtcaattcacgggatcaccaagtttccttttacgcgacctacgcaactacatccgctccttcaaatactatgtgttatgactcattacaacgatatctgctttactttgtactcggcgagcgacggactatatccaccggaaagggaaaagaaccaattatcatccatggatggcacatatcaaattcactattttcttccaaggttggtttagttcctaaaatcatagtgtgtggtctcaaaggacatagtcgtgccttccgggccaaattcggaatcggagcaagatcaccaatataaccttgcaagaccgaaattaccacacttaagactcacaagaacttgtcaactcacttaaacaaatccaataatagttctcactcactggagccacacctgtccaccaaacactgaacccagcccatatcgacgaactaaatgcgacggccaccctcgagctcaacgggcaaacagaaagatggcacggaaaaagaacagcatgaaccgcttactacccaaagagccgaaatggacagaatccgcagttaatccgcaatgcatgattaatgactttgggatatcgagggaacccacgccatcgcagcaggacaacacgattaagaagtacgaggaacaaaacatacagctaagacgtgagatgaaggaacgggggaataccatcaacaaccttgtacgacaccacaaagaaaccgtgagccagtttgaatataacatggcaaggatggcaaaccagctccagaaacaggcaaagatgatcgccgaccttgagtggcagaaaggaatgctgcttcggaatctcgaggaacagaccagaatatcatatgcgctaggacagcaagatacgaagacgagggaagtcttcggtaacatttccagcacgatgttcttagaattcgataaacagacaggcataattgacgaaaaaacgagcgctatcctcaaacttgaagcacagaaacaaaaatcgctagcgatcttgagctacaaaatggaaagatggctttggtgcttgaatatctcacaaggaacagtgaagaatgtgcctctctctgggactaggacagaagaggagaagatgtacctgatgataaaggcagtattgaatgcctgtggggagagcgatactaatggaatgagccgaaccagtcgtttcctgaagaatataagacttgtcaaatgcgaatctcgtgtcacggagggaccccggagtaaaccaacatgtttattctgatcctatcgtctcggcctaatgccggtatgatatagaaccgaccacaggcaatcgaatcgaacaaagatggaggatttgcagttcaacaaagaattacattaaacatccacgtcactgtttgctacccagcctaaccattttgcaatcatgttataccccaaattaagattccaagcgcagatccttctcactgacgttgctttccgcagaaactgacgctatggtgccgatgacatcgcgggcaatcgacagcatgatgtttgggccaagaatgcgttaacgagtgtgaagaagtatggcagatgaacgggtttgtgtctgtgtaaaccggacgaatgggagctcgactaggtcgatacttccgacggggagtgtatctaagagcgtttcgatggtgagatgaggaggagacgggtgaaattgtcgaaggcattgttggaacctccttggctgctataaattgggtttagtctcgctctgtagattggtttacatgcgacttacctgctcaagtcttgctttgtgccgctaatgaattatacaatctgatttatcgattcaagatgtgaagttggttaggctttgtttttcttactagggcaaccataataaaaggccttgacgggacgtctaggaaacgaagatctagatcatgcaagggctagaatggattttttttctgaaaattgaacccgatatgcaaggtattcacgggatgatgatcgatatatacaacgctttatatatgtctgagataatcaagaaagttgattatcgagtcattgctattgtgttggttatcactccccatatagtttgcttcatatcaaaaggtcatttcgatatgataaattaagacaaagaaaggcatatatatatctgcattgttaaagggattgtcctactggatcgagggattccatagaatattataagtatctcagtgctcctctagcgtcatagatgcttaatcaaaattcagaactatctatcttggttataaaagcccaaagttttactaggtctaaaataaataaagattgatataatccgagatatcgttcactcaaaccgttctataaaagcactgaaccccgcgatggcggggcaaacgcgcccaaggtcatagatatcagctcccccatttaggaattctcttttacatgaccttgtattgaaaatagatagaataaatgtcaataatctacttctcatttgagttagtacacgtggcgggtgaagctcaaactcaccggagtggaaatccttttcacttttcccacaatcccgcaatccactttcaacaacctttgggacaccctcgaacataggccaaaatgcccgataaagactccagcacaccccgtgtcttcctctaccgacacggtatgttccagaacgtcaatatctgctttccgtagtctgactatagtccagggcagacggaatggtccaagaacggacggtacaccggaatcacggagcttgagctcactcaagatggtgtcaaccaagtcaatgcatctggcaagatgatcgtcggatccggcaaattgattgacccagccaaacttgcgcatgtctacatcagtcctcgcaggcgagcgattcagacatttgagattgctttctctgatgccgataagcaggcgcttaatgatgcgcataaggtctctgagacagccagactcgccgagtgggactacggtttgtatgaaggtctgttgaccaaggaaatccgagccttgagaaaggagcacggtctggataccgagagcgagtgggatatctggagagacggttgcgaaaatggagagtaagtctttttcaaagagaaactctttcgaattatatccagtctacgatcattatatctgacaagtcaatacaggtctgcacaacaggtgacagaccgtcttgataatctcattcaagaaattcgcgcgatccagaaggacaatatgcacggagaaaatccttctgatatcctgctggttgcacacggacatttgctccgtgcctttaccaagcgctggttgggatatcctatggagttccctctttctctgatgcttgaccctggcgctgttggcgtcctcaggtaattcctttttctcccacttcgctggcctggcagttgacctttatttctacttgtagttatcagcaccatagcattgatgagcctgctatgttggtcggatacggatttccgttgcaggaatgatctgatatgtctggataatagatctcatagaagatagcccggttgttactaaatatagacttgatacatggtgatgaagagtcaatggggattctggcctgagtactcgaaagaactgtaggctctcctccaggggccgtagattattcatagtctaattccagtccgtccaattgatcctcgaagactgtagtaaatgggatgaatattgtatgagatcaggcaaaatagacgaaaatggattatttgcccacatgactagaaaagagaactttataacttcagagtttctaaaaccttctactgaaatcgcatcgaggctatacttcagatcaccagaccagttcatcaagtcatgaagttcaccgagttcatcagaagttcggcaatgcccgttcgcctgacctggccaactgacaacagatatgaccctgcccctgtcaccccctaaatgttgtgtcttcacttcaaatatgacatcaatacgagtgtcttcaaaggcagacaagatcaggtgggaatagaggctcttggctgaagagcaccccggatggcactaacgggggggctatatgatcgcctcacccctgatgggtttcttttatttctttgcaactttacgccctgacatatgcttttcaaggactttcctctggattgattctactaccgttctatcatagaagccttcaatcttgaaagtggcaaggtcgccaatatcatgccgcacaaatcagacgagttgtcggtcgctgaggctgaaaaggaggtccatgaggcatcaactcccacgtctccaacaccagcacaagaaaaacgcggttcgaccttgataagtttcttctcgtcttttcttggtcccaagaacccgcttgcacaaccagcagagccacacaagcagaccgtatggctgctagacaatacagcgtaccagccggtaaatgaggatgcaaacgagaatcatctgtgctggcacgccgaagtagtcgcctatatcttcgaaacagaagggcggaaagacgcgggcaacctcgtcgccgcgatcgccgaccacatcgggctggacggcgaggtgggcaatcacgacgaagcacgccaacgcatcgcagagcgcgtccagcccttccttgaccaggtgtcgccagcgcgcacagtcatgctgcaggtacccacatcgccacgggcgcaatcgcacggactcggcccgtccgaccgtaacggcatcgtcagccaaacggttgatatgggcgaagtgggcatgtatgacggggaagttgtgcggccgcggctgcaggatttcggcgacgaggctgtgtcgatgagcacgacctttgccgcccctgagggctggctggtcgtctcggatattgacgatactatcaagcgcactatgacgcctgagccgacgggagtgattcgcacaacctttgcggatatccctgagcccatcgctgggatgccggagttttataaatatgttcatgctgagctatttcctgcgtggttttatctctccgcgtcgccgcataatctttaccccttcctgcatgacttcctggatgaacactactccccgggcacgttggtgttgcgcgattactcgtggatggatatcacggggcttatcaagtcgcttactgagcagacgcaagagtacaagcttgatcggctggagaagattcgggggtggttcccgcgtcgaagggtgctttgtataggggactcgacgcagaaggatccagaggcttatgcggagatgtatagtcggtatcccgagtggattcatgctatcattattcgcaaggttaaggatgtggcgggtatggaagagaagaatgaaccggggaggtttgagaaggcatttgagtatgtgccgtcgcatatttggacagtctttgaggatccaaaggagttatataattttgttgatgggctgggtatggaagaccaggccttatagatgtaataacctgtgtatatttagttggaatggctattttgaacttttcaaacatcactctcgtgacacgcaagggaataacggtctttgctgtttgtgccatgacaaagacaatggcaacctttactgcaactatcaaatagatagactatgatttccaccgtaccttgggggataatgcaagcagcgatctatagacccattgattgtgatcttctatcgcactatccaacttccacgaatcccagactctatatataatattttcatgccaaaccaaatcaaatagagatataagatcgaattgctgttcattgcaatggaattgttcgggattgtcaagtggcaatgttgacttaagccctacatacgtcacgattaggaaatgacctctgatctatagacgaaatggcgaagaccatacttccaaatcgataacttccttacgagaaatcattgtaaagtctcaaagatctctaaactaagaagatgtatcaagatccaaatgatactatgcagtcagacatacctcccacgcagcccatcgtggaacactccccaaagcatctatcagagtcctcaacacgctccccaaaagacattaagccgccatctgagccctcaaaacgcgcatcaggagcgacaagaggcacatcagaagccataaagcccccttcacatgctggaaagctcagctcatcaacgctgaacgactcaccattcataccactgtcgatgcgagccctctacttcaccccagacggatcagacaacgacacacccgatggagtcccagaaggagaaatcagcgacgccatctcacccgacacaagcacaagcgtcgtgcgccagaaaggaacaaacatcgtcttcgacgctgggttcccgaccccgcagccctcccctcagcaatacctgctgaagatcgccacagcagccttctgtcacgacgagatccgtctcgccagactcctcaatcccccaaagaccacgccgcatatcccactgcacagtctctgcgggacagtcgtcagcactccgcgcgacgacgaggggcgggaagaaggcccgaagttcaaaattggtgacgtggtcttcggcgtggtgagctatacccgtgatggcggagctgcagactatgcagtcgcgactgagaccgagctagcgctgaaaccggataatatcacttttgctgaggcggcggcacttgcgctgccggcgttgacggcttggcaagcactttttcggtatgccgggcttgatcctgacttgcctggcgggttgggcgagggcgatgatgagtttgcgaatgggacggggcggtggctttggcagcgtcaacgccgtgagtccgtgctcggtagcagggattatggctacgggcgccgcaaaagcagtaatagcggcctgttaaatcatactataagtggtaatggtaacgaaagtgggaacgggcattgggtttggcagtggaatcgcggcggctccagaacaagtgccagtggcagcgtcagcggcaacggcaacggttccgacattgacaacatccctccagctgctagagcggtcaatcccgcccccagtcctacgaatgtgcgtcgcgagagcctaatcagtctcgtcagcggtaatcccagtggcaagaaaaccgttgctcgcgctgccagcacagttgaccccaatcccaagagtactgtccgccgcaacagtttgatcagcctgatcacgggcaacaccgacgctccatcctctcgcgctgcgagcacagtcgatcccacagctaatcccgatgccaatagcaaaccccgccgcggcagctctagcccgagacggcgcagcagcctgttaggaagcataattggcgctaattccaacggcagcgggaagccaaaaccgcctattatccgagtactcatcaccaacgcccgtgacagtgacatcggccgtatcgcagtgcagatcctgcgagcagattcgctcttccccatagcgttccggccgtgggtctgtgtaacctgcacgcaagtcgaagccgatatcatcgagaaggactgggaggtggacgagatagtcatcatcccgcacctcccgtcgcctgaagagtgtaatatcgagaaggtgttccgcacgcgccgctgggagccggttgatattgtactcgactgtgctggtggagaagtattccgagctgcccatgctgccggtgtcgttaaggaccatggggctgtgttgactgtcgtggatggccaggttgcgctgcagtctccgcttgttcctgagaaagatgtgctgggcgagaggaagcgtgggattaaaagccggtttgtgcctgtcaatcctgatgggccggctctggagcggattgcggagctggtggagcagagtctggtccgtgggagggaggttactattgttgatctttcgcatgcggtggatcttttggcttctggggctgctgggacggcggggagtcggcgcggtgggatggtggttgttagggttaatagtgttgcgttcacgtagattgtcatgtttatgcattttaatacagagatatcaaaagtaagcacgtcacagggagcaatgatgtcgaaagcaacctatggttgtctatcaatttgaaaagtgttgggccacttactcggttgggccaaatatcactttcgcaatgcccatgtcccaaaagccaagtccaagaaaagaagaagggaaaacaaggggtgatgtaaatcaaagttaatgagatattccatacaagaataagttttgacccgatgactgcatatgaaagaaaagaaagcgatgctctgccccatcccacaagatcaaactacatgaacagaagaagaaactgaagttttgtggccgaggtggaaggcaagtgagagagagaaggcgcaaaaaagaagtcgtgaagaacaaaagacaagtgtattagtacctccgttagagtaaagagtcaagtctggtaaaaacgctcaagcatgcggcgacaatctgtctacttgttagcacattcaagggttgaacgcggtatgaggtgcagcttacctccatctgaagctctttatccttgttccgattgatctcctcgttgaccacttgagctaaattggctccaatcgcctgggaacctccggccttcctgccaaacggccattgcgaatactctgctagcaattcatccacctgcgcgaaagctctctcgcgagcctcgtggctcatggtgaccaaagcgttctcgaggacgtttgcggcgtatgcggcgcagaccatggtgattgagcgaaggtatcggtattctgcgtcttcgggaagccatgggctaggagggataatcacagtgcggttactgcaaatgttgcgcacccgtcggtggagctcgtctttcgcgccgccgtcggccacaggatgcgtcgccatatcgaagagaaggaagttgcgcttttcggttcggagaatacccttgtccacaagacccttggctagtcgttcccggacttgcttcaattgatatccaatcttcatcaggttccaggtttcgcctaacaagtagccccggtcagcaacgtcgcaacccaaatttctgctatgggctgatctcaccactcagcaaatcaatccatgagttgacgctcatcttctcgcttgacttcatcatcttcagcgtctcgtccagcaagacctccccagtcaatgtatcgtcgatgacctcgatgatgcggtcggccagggggaaacgtcgccgcgacgaatccttctgcatgcttatacggccgcggagcgcgagctcaatgacgatacaccctcgcagggcatacgagatgttttcgttccagaaagacagataaccctgttgcggcgtgggcgcgaggtcagcgatcggaccacgaatcgaacaaagcaaagttggggcatgagataatatccatgaagactcacctgtttatctttcagacccagcagcaagatatcctccatcagagtcaatttgggctgcttgccccgttcctcgttttcgctgatgtcgcgggggtcgaatgcgatcttgtggccattctctgcattggtaaaagacgtttccggtccacggttatccgtcgcagagccatttcgggagattggcgatgacactcggttgtcatcttgttcgtctgccccagcgactcgaccggcgcctctgcggcgagtcaagcccccggctgctgaggccatgagatcgggtcgggttgggcgggggatcaaaaagggatggagagagatatggccggagatgaccaaaggcttccgatctgtatgccggtggttcgaatggtctgggttggtgagatgttgagagggaccgtttaggccgaaagtctgcggttgaagtgggactttcggtgtcaggggaaaccagagaccgagtgggcttagccaaaacgatacagtgtcgagtatactgaactaaacccgcctaaatacgagaggaataggcgactgtaaagaatggagttgtgaaaagggtgaagttcaaagtaagttagttcggtgatgtggctctttgagtatcggcgggtgcttaaacacccaagggctagcaatctccgcgttatgagtttatttgatggctctattttttgaaaaattgggaatatagttaagttagtatatatgtacaatctattcttatatttcgatatgcttatgtactctgtgtttttgtcttgtgttcactgttaaaccaaaatatgtagataaatcaacttaggactacatccatacattccatggcaatcatatgagatgtagaggtaactatatacctaaacatatactgaaatgtctagacgcatatggtgaataccactacgtagcagttctgcttcaaaattgcataaattgcataaattgcactcaaatgatatacacgatataggaaagaaaagccactggcatgtattcagcatacaaaatagcatgtcggttgagtgtcactgtgtccagcaaaccccactgatgccaacatcccgattctttttctatccgactctccaaccgatcccaggtattcaaattaaatatttagtgggctgtgaaaaagtcagcacatgtaaaggaggaaggggtgctatgggattcacataccatcgggctgggccaggatgtactcgacagccttgtcaactatacataatattcatgtcagctctggtaaacgaaaaataacaaggtcatcaagccctaacataccgctgtggatctggtcggcctccttgtcggggatctcaatgctgaactcctgttgagacggttagatacccatcatataatatacaattgatgcttttccgaggaaaaccgggcgcgtacctcctcaatggccatcacgacctcgacagtgtccaggctgtccagaccaaggtcgttcgagaagtgggaagtgccattaatctgcaggtcaaataggtttagtcaatgaatgttttcggtcgcctcccatagctcatagcgatgtaaaggtggcgacggtgcatccgacagataatcactgaccttgctggcatcggagacctaagcatgaaacaaatgcagttagtaatttgtttttcgtctatagccgatagatggcgagatttccggggaaacaacatgacgcaccttgtcgaagttcttgagcaaattgactatccggccctcggcctcgctcttgctaagaccggcaggggcggagtagagacggataccctgagcgaagcgaggagtgaattgagggacctgggcagcaatgggggagctgcggatgtggaagggagccggggtcctgatgacacggggggcggaagccttcaaggaacgaacaatggcggagcggaacatgatgaagtagattgatcggactagcgcaaaggctgaaaagatctaaagtattaaaaagagatggtggagagtaaacgggtagagattggggaaagacggctgccgcagaagaggaaagatgtgaggtcgcgcccagcaaaatcctgcgggccaatcaacgcccgacagaaaggaatgacctaagccggaaacctgcaaaccaccacaacctcagacttgctccccttcacctccaattgaacctcgattgccccatatctccaacctcactctcctctccaaaaccatggccgccacccgctcggtcgcgaggctaatcgcctaccgtcggccgacccccttcggattgctgggctcaaccgcaaacttctcttcttcgacgtaccgcgcagcaaccccagcgggaccccctcaggccgggttccgcctgcccccgcccaagcactgggatcagagctccgagtccgccttggacaaggccagcaaatatttcctcatggcagagatcttccgcggcatgtacgtggtgcttgagcagtttttcagaccaccgtaagtccttgtcccactcaaccttgccggcgatacggatcgcaatccaaaatcaatggcatcgaaatatatcaactaattgcgttgcaatgttccagttacaccatcttctaccctttcgagaagggtcctatctccccccgtttccgtggcgaacacgccctccgtcgctatcccactggtgaagagcgctgcattgcttgcaagctctgtgaggctatctgcccggcccaagctattacgattgaggccgaagagcgtgaggatggaagccgccgcacgacccgttacgatattgatatgaccaagtgcatttactgtggctactgccaggagagctgccctgtggatgccatcgttgagagtgagttcaacaccctcaggttacatctcaattgacattcaagccggattactaacatttttttcttacagcttccaacgccgagtatgccaccgagacccgcgaggagcttctgtacaacaaggagaagctcctctccaatggtgataagtgggagcctgagattgcagctagtgctcgtgcagatgctccctaccgataatctatttccctccaatctgattgggatcttcaggcaaatccacatctattccagatgttagatgtgtgaacacgaagatgctagtcgcaatacccatccattcaagaggcactaagcctcgaaaaacaagaatgattttaagcccatcacattactgtacataacttgccctcgattgtgttatcatcttgtactagtcaattcctaaaggaaatgccttttcctggaaccctggcccccttgtctcttttattttctatgttatggaatctagcaactctttttcttctagttgagattcatatataaatttggcaatcccatcttatatcttcgctgaacactttttcgctaaccgcataaatatagtacatcttgagatctataggtttacataggcataaagacaaaaggaagacatatacagctcgataagaaaatgatattgtattcacagataaatcaaatcgctaccgatgctgtcatgcatagacataaagtgacagactaagctgccaaagacacaaacgtaaacaccaggcaccttgatctccggatggatatttcccagttcaaagtctcaaaacactttttttagttcgggggcttctgtgtgcgatcttgttttagggatgtaaacatccaagacacaaagactgatctgaggggtatgcagagaaaataaaaagaagaacgtaaaacatgggttgatgtaaaagcaagtgagaaacgagataaaagtaagccactagatagaagcttgtttatttcttcttgccaccacccttgaagctgccctcaaatccaggacgagcagccttcttctttccactgctgctagacttcttcttgccccccttggtgcccttgtcgtcccggcgcttgcgaaggttctcctcgcgcttgttctggcgctgttccttagatttagcgacagtgtcaatgcggtccctccactcgcgctcagacttcttctttgccgtttccttgcgcttgagggccttcttcagcaaagaggtatcgtcgcggacacgctcgccgtgagcacgcttcttcgcgttcaaccaaaggtccttctcttcaacatcggcacgcttggtagggtccatctcttcgagacgggctttcttggcctcggcaaccttgagctgggaagccggatcacgggcaccgccagtcttcggcttttcgcgtacgttgtttccggtgatatctgtctgctggccgtctgtgaacatcacacggccgaaggagaagttgttgctagcggagctgacggactcggcaggggagcggggggatgccaggagcgatccagagccaccgggcgagaagcggcgggccatggcctcgtcattcttcttttcttcctcaaccttggccttttcgcggagttctttcttgtgtgcctttctttgttcggccttttgccggcgggcttcgatcagctcttggcggttgcgtgcaggcttgccgttgagtccatctgcgtggcgcttggcccggagctcatccagacgcttctgtagacgctgcttcaactcttcgggtgtgtgcttaagaggcttgggctctgaggatttgacgtcggtagagacggagggaggaacgatggaggaaatggaggaggtgccggattgggggtttgaggtatcgaaggtaggagagtcggtggtagaaggggcagaagaagggtcttcctgttcagcgttgaactcaatagagaacccttcctcgacaacaccgtcatcttcttggtcgtcatcttcatcctcggacgcttcagtgtccttggctgcattgccgttaggcttggttgcagatttttccgaatcctcggttggggtagtcgatggcttctttccctgctgggctttttccttccgggccgcatccttggccttctttttctccatttgtgcggcctttttctgggccttcttctcttccttttgctttttccgtgcctcggcctctgctgccttggcggcgtctggcttatcagtcttttcaacctgcttttgcttcttgatgttggcggctccgcggttcagtccttccttaggggtctccgtgcccatctctccgtcggacgagtcggactcgagggtgccatcctcccgctttcgcttgcgtgcgttttcatccatcacgtctttggcggtcttggcggcatcggggttcagcttcgcccgcttcgcctcgcgtgcttgttctttggtttgctttttgcgttgccattgatcctaaaaatgaggatgatggtcagacagagatcttcagaattaaagataaagccaagaacacaagctgactccagtcccaaagccgctaacgtatgaaatgcaacagggtcacatacacttgtatcttcttcgccataataatatttggcggggatcaaagacagcagaccgtcaaatgcctgcgcatggctgcgcagccgttccttgagggcagtcagctcgcattccttgcggggcattctccgagtgcacaaacctcgatatcatccataatattttccagtacacagaaattgtattctggaagggaaagctagacagtcaagcgcaacgaaaaattttggggaaggaaatcttggcgctacaattgtctccgcttcggctggttcaccgccctcacacaacaattttgctgtattggtccgtgcattttgatagacaggctccaggtcggttgattgttcccttcaccgtattctttctattcatcctttttgattgtgctcttttctaccttgatcttcgattgattccatggttatgcattgttttattcaatacatgaataggcactccatgataaatgacgtggatattctctccacttctatatcagacctgatccacgaggccagtcctaacgtctagtccagggcatccctcgcttttgatacttgtcacattcccatacggccaaggatctgtccaaatcacgtcgaatctgaaacagttagcgcaggacataacacaaggcaaacaaacgctcttctgtcgagtcgcgagtcgagggttccatgggacactcgtctcccagacgtatgtcaagcaatgcgaatctcatactaacaagaagacacatgacgataaaaattacctaccgcttatttggatattcaacaggctcccaggcaccaagctcctccacaatcccactcatagtcgagtgccgccatgcaaccaaaatgtttcccggtccgtcatacgatctgatcgccttagccacacatttcactttgttccgcttgcaatgtgtgtcaactctgagacccagatctctagcaaggggtagaacggtttcaaacgcacggccatgtgtgccatctacaggcagaaagcatattgtcagccatgtctatgacacttagtcacctgcgtgcctcgttgcagcactgtggtttcgatttgctctcgattattgttgtaaacctaccccatttcacacgaggtgccataatatgcccgatgttgtactccgagccttggccgaaaacatgtcttaaacactgtgcccgcttgactccgtctagtgtcaaaccatggtcgttgggatcctgaggcttctcgccgtgtcgaattatatagaccgttggatgtgattttgcggacacgataccgaggcaaaatcccagagctgagaagaccgattgcagtcgcatttttggcacatacactaatcaacccagtcgtatacaaagtaagcgggtaatagctaatgtatggacagtcgagcagtggaagaccacagaaaatgatctttggggacaattataagagtgtgggaaaaagcaaaacctcatggaaatttgcttatgtcgatcgggtgcccttagctctagttataagtacaggacaccattttgttatggagtcacataccgaagagcacaatagggctgacacaaaaaaaagcaaaggtggatcagcagatgacattccaatgatatgatcatccaacagcaagggcgactacagaaagcataaggttctgcaagttgacaaactacaggcaggcgttcggtcgatgtgctatgatgcagtggtttgattggtctgcagattatgcatgttcattgtactgcatcgatcgactcggggttgggaatggtctcggagatctgtacacagtacatatgcagcggtgtttatagtcaagagcacatgtacaactgcgatttagtttataaacgtatggaacagatctaatgacaatgaacctgtggtcggagtatatctcggatgtgattgaagactctcacaattcgatagtggtcagcgtgcatgctgtacaacgtaggatatgtatgaggaccctaggggtagatcaacctactgtcacccgatcggacaagtcccatatgatagtcccatgtttaaactagtcatgcatcaatcataatcgatcaactagcccactagaaacgagagcatctaagtggtccacggcatggagatatgggaatcgggggaggggcaacacacaagccaggcttggtgatttatgaaagaaaatggtctggtgactggctcctttgccaatattcattgaaggcagtaggtgtctactaatttagtaattcctcggtcgtatgccctagatatatattgttgacaccaagtgattgacgttgtacattgttgcctcccgattcgccatcatgtgatggtcacccgagcatgtcatcattatgacttcaaagcaatttgacttcgatgttgttttgacaacatgttgtcagtcgtaatagttggtatatagacttggcttcaggcgctattatctcttaggatcagaaatccacgactcgtgatgtgttcggcaaatgacgccacctttaaactgttctgttcagcttactccgtagcgtaggcagccacataaaaccgtcccaatacggccgatacagaggagacctcgggagccaatgtgcggcagcggagaaagcgattctggaagatccgtggaagccgatagatccgcgtaatctattttgggcctaatctggtaatgtataaaccgaggctgagcccggcatagccacagtaggttacagtattgtgttccaaagttggaaatgtggctgtgtaagtgacttaatcagaggctgagtgcatcatccatggatagatttcaagtccgaactagtaaaagacggtaaatgcacagatgcgcaagatgcccaggcgtacagggctgaaaatgcccgacgcttaccaacgctgcgcctcccctcgttccgtaacgtttcgcttgccatgtggggttcttaccgtcagccctgtggttacttgaagtcacctcttataaaaggttgcccccctcacttgacttctcttcatcacttaccactcctcacatctacactaccccaccttccatcagccatcaattttttatcaagccaattcaaattacatcatgtccggttacgatcagtacaaccagggtggctacggccagcagcaaggctatggtggccaacaaggctacggtggccagcagggctatggccaacagcaacagtacggtcagggtcaagagggctacggccagcaaggctatggccagcagcagggttcttccgactactactccggccagcagcaacagggctacggccagcagcagggtggttcttccgactactactccggccagcagcagcaaggctatggccagcaggaccagaaccgccaggggtatgtccttccctctccattcacttcattcattatgtactaacagatcatagtggctatgagcagcagcagggtgctcccggtgaggcccaggagggcgagcgtggtcttgccggcgctctcgccggtggtgctgccggtggcttcgctggccacaaggtcaaccacggtttcctcggaacaattggtggagccatcattggtagcatcgctgaagacgctgtcaagaagcaccgcaacagcgacaaccaatctcctcctcagtacggtgccccccctccaaacggtcaatatggcggcggccctccttcccacaatggtagcggcggcggctccatgatggatcagctcggtggcttctttaagaagtagaaggtttccgatgaacctctctcttgcgttttctgcctgacgacacggttttcatgaatttctttctttgctcttattatcccaatgggtcggcatgcatttttcttttcgccttccgccagatcgctttcatttctcatgggtttttttctcctccttaaagaggcttgtaccatgacagagctgcgttgatattggaaatcgcctttgtgtggtctgaccataattttcagaattgcaacgtgattaacttgcaacattccttgtaaaagacagtaaactaattaagtaaattgccattgcaaatcaaaatgatagacacttccatctgtgtgtatgttgtagcaggcggaggccaaaacacaaccccaagtggaatagcgtaaggcctcaggcatcaaccgccaagcccgacaaaagttcgagcggacgagtccccagtaacctcctcgtcagacatatctgcaatttagcattcccaaaatgattatacggaagctttgtatgcgccagggttagtttggtccaattgccgctatcatatttaatgtctctgctaacgacatcccacaggccgccagctccttgctctgagccgtcgagccccgatctccagtcgtttccaatcgacattgcccgaaaccccagtcgagacattgcagacatctatcagagatgagatatctcgcccagaaaaccccctctttgagatggtgcaggcgcaatctgaggccagcacacccgcacaacaagagttcacatcagacgagcctcaaagtgagccgcgaatatcttcccggagattcctccaacgcatcaactaaccttgtctttcttttcttcccccaggaagcaatttcaaaaagctcggcacaagtgtgaaatcctcctacgaccccgaaaatattatccgcaaccctcccaagccatcccagatctccctggaaatgctgctcgcagcaggaacacacctgggccactcgacctcgcgctggaacccacagaattcgcgatacatcttcggtatccgcgagggagtgcatattatctcgttggacgtaacagccgcgcacctccgccgcgccgcaaaagtcgttgaggaagtcgctgcacgtggcggactaatcctcttcgccggcacgcgaaagggtcagaagcgggccgttgtcaaggcggcgtcgctggcaaagggctaccacattttcgaacggtggattccgggctctctgacgaacggcgagcagattctcggccactgtgagacgaaggttgtcaacgcgctggacgaggaattgcctagattcaagtctgatcttgctgatcgcccgtcgctcaagcccgatttggtgatttgtcttaacccgcttgagaatgttgtcttgctgcatgagtgtggcctaaacaatgttcctactatcggtgttattgataccgatgcggatcctacgcgagttacttacccgattccctcgaacgatgatagtctgcgggctacttgtcttattgcgggcattcttggtcgtgctggtgaggcgggtcagttgcgtcggttgaagatggcacgggagggtcggacttcttacaatcctatcacagccgaggagctgcgtcttgatccgtttacgggtcaggctcctggtggtgagggtcagaagaagtaggggggtgcgagttgtgtattccttctgattgcattttcctttcatttttagtatccggtcgattgcattgaaacgacgggactctgtattgtatagatgattccaggtcttggtgttgagatatgtattaacaactttgagtcaattttggttctttttttacttgaatctagcctgtaacgaggggacgatacatcagtaacagcttctggaggggcttaagcctgtgatcttcggtatagatagttgggccaaagatgtgatctctcctttaatcccctcaaaaaatagcaggataaaaggcatcactttgccgacctgttcaacgccaactatacacttacatcaacgcagacgagatctatcgccttggaagaaaacggaaagcaacaaggttcacggtcttggtaccatccacctcggaaaactcgcggaatcgctcaaatccacatttcaacagtaccctctggcttccactattgcttgcttccgtgatagcgatgaggcactcatccactacaccttctccaacgaccattcctttctgaactccgacctcccgctccgtccgaggcaattctgaccaaaaccgcagccaggaactcaagaactctgtcgcgatgcctttcccccaagcgtccgtccgaagcatgtatccaacttcaggccacccatgcgttccaggatacagatgacagccaccgataccgataagctcgcccgttttcttcaggcagatggcgcaattggcggtgataagatcgtttggtggtaggaatgcatccagtttggattttgtctcctcgagactttcgtcgatacaccccgccttggtccatcgcatgacttcttcctgtgtgcgcaagacgtgtaactcttccaagtcggttggttggaggggacggacgagtaagcgatccgttgttattgctgcgcgctcgctatttgcggggagcgggactgtgggcaagaatgccttcacaattacagattctccctctgtggccatgttgatacctactttcagtgctgctttccagaaatacctgtgtgtgcggcgcggttgagtcactaaaccctggaatctattctaaccttgaaagtgcactagtgggacaaacccaccttggcctaactccgaactataattggcgtgttgctttggtacataaaatgccgatatttctaggcaatgtggcctattgatcagaaagaaaggctagtatgcaatttatcaagagagatggaggacggacaagagatggtagacagagcgagatttatttgccctaactgttaaatgtgggtgccccaggaaatggtacaaacccagtaccatcaatatttgaccgaacgacgagctgataaaggttgtgaattcttactggagaatcccaatttcatcaactggtaccgagcttctgattcacagcagttgatgatcttcggcgatatgggcagtggaaaaagctttgctatggcatttcttgcggacgagctggtacgaagaagcaaacaccaattacctcagcccaaggtctgctattactattgccgggatgatgagactgggaaaaccgtcttcatattatcggctataattacatcgcttcctgggcagctcacgggtctgaagaagccatttgttcagtggtataaggaggctcagacttctggggactttgatccggcgacaaatttcaaaacactgggagagttcttatgcagagtgcttgaagcaattgatcgcccggtctttatggtgattgatggcctggacgagtgcaatagagaatcccgaagtaatctcctgacaatattgcgaaaattgtcacagggggttttgctgaaaatcatactgtcttcccgtgcaaaggagagatcttggaacagcttcacgatacggctaagatcgaaatggtagctgacgctcatagagatggcattatcgtcgcaaaagtcgtcgaaagaaagttgttcgatctatcgccgaatgtcaagtcacttgtcatcgacagacttacttgtctagcaaaaggaagcgctatatggacaaggatgactattaagctgatctaaactcgcaaaatcatggcatttgatccgatgaaaagtttcttggaagaaatgtcactccccgaacagctattagaggtttacagcacgttgctctcctgctgctcttcaaacgatctcgaaaacctcaaaattgccagcaccgcgctcaagattctcgccatcattaaccgaaatttgagcatactagagctctcctgggtcgttgcattaggtacgactcaacatgtcactaccgtagatgctcttgccaagctggtggatcaccagagagtaatgaggttaattcaccagttcattgcccatgtcgagttcagagacgtaaggaagcaccaggttcgactcgtgcaccagtcggtgaaggagtttgtactgaagaatttcgtctcgaatcagccatggcgacacggcccaatctcaagagaacccgatgatatgattcttgaccagcgctatgaaagtctgcaggcatttattcttgatatttgcgccaggtatcttcttcttgaagacattggcagaagaactctgttctccgaggagcttgtggcaattgcggagctaccccaaggatccgatatattcaatgataacgaagggtcgattgagtatgacggacattgcacatgggatgcctgggaggaggatatgatcaattttgatcccactgatcgcggctttagagagttctttgtctacgcatcatgccattggttgaatcacttctgcaccattacagctgaacatattccaagtctagaaaccatagagaagatatgccaagcgggctccactcgattgagcaattggatccaacaaaactgccgcccaggctgcacgttaacgccaagatttgagtttgaaagcagtctgtacgatcctctcagtatcacttcgctttatggctcagtggcaatgctacgagatatgcttgaaaactcatccttcgacaagaacggttttctcgaacagtcagctatgagagctgctcatgagattttccgatgagggaacgtatcaagcttggaatcatcttcttcggtgatcgacttggtcatcacctacgacatcttgactttttccgacttatcatcaaatggtggtgcaaccgcactctcaccgaccactaatgcgatcttgtatttgatcttgtcaatggtgtgtcaaatcaaatggtccaggaacaatggggaaatgaacttctgtgcatagctgctagtgcaggctgcatgcaatcgagacagaatgcacggttgcactgttaaatagcccttctcatcggaatgagaggttaacagcacgtggataattggaggttataaccttggaatctagtcgggattttgttagatttctcacaggatatgtcatcttatttacttgccgtgatgaaccctatagtaagtggatggatgcaaatgccaacgtctgacttggcgggtaaaattctcctggaagtccaccggggcacattggggtaattgacttttgttcgaacgggcttccttaggcctgtgttttaaagttcaatgcggctctacaatttccatgggtatacaagttccaaccttggaaaagcttttaagcttatttttccaactcaacctttatgacttccagctgttctttgtttattggatttctttctctttgcattgttctctttggcttcgtagtctttgcgtagccttcattgcattgagagttttctttgaactccaagccgtctcaactctcaactatataaaacccaacactggccaccgttaaattccgtgagaaggacatactatacctagatgtaatagttacctagcgtctttatagactcttctattatctcatttcatccagccctttaaccattttcacaaagcagaatggacgacaattaccctctgtgggaaaagaagggaagaagcctacagaaatggatcgagaactaccgtgcagcgggttgcccgtactccatttccactttcaatctgaagcccagacatccggactataccgtcgatcgcacatctgtgcatctagacgcaaaattattgaccgcgcttaacatgagcaacgcgaattccacctgtcgaaaaattagcattaggcagcgtgacgaaggtccgccagtgtggtggattgggcgcactggaccaggtgtgatcttgattgacgatatctttaagtccaagagaagcgacgatccatatatatccgagttcaccaaggcagcctacaaactggacttccccttggacagtctgaagaatgtaattgttcccaatgtaaacgaagtgaacaccatttcgtgtatcaaaaaggtgtacaaatcccgcgaaggacttcgttatccatccagcacacagcaggcttgggagccgtcctcgtccgagttccatgctctgctaggaactggaatcggcaaaatcattgcagcgttcgttctgtgtgcatggggccaagggagaaagcgaattgtgagaattgttactttccacattggtgccgacgttcacaagctgtatatgcggttcgatctggatgatatgtgagaatttcttccttgctttcgttggccatctgatcgttttgaatgtttaccttgaggtgagtaggtagaataaattgtctgtgagagtttctttaatcgcatttatatctaggaattggcaattggcgatttcgacctaatacatctctgacaaggcgtgatttttacagcagcgcttcagagcgactaatatagaaaaaggtgcagatatctgagtcggatatcatgatatcatgatcataaggcagctggaatttcagacgaaaacaaaacaatagtatgtaaacacacggagaccgcggcctcaaatgccggaaatgaccatatttctagcacatacaacgaaaatcccaatatggcacccatcgctgcgattgcaaaattgttctggtttcaatccactcaaggaaatatcccaatccgtatctcattaaggcatatgatcttcataaaatcatcaaaaacacccggcgtaaaagaaaaaggaaagccgatcgtataaaatcaaatcaaacgacataaggcgcaggtctgctgcgactggagctgcgatgacgcgagtgtgagccagagccatgaccacgacgactagaatgactgcgtctccgaacaatcgtctccttaacaaccgggcgatgcgaatggtacaagaacagcgcaagcagcgcagtccagaagaagaatatcgtctccatgataccaagtgcgaagcaagccttcagcatagcgcaggtcttgttgacgtccagcgacagcggattatttgtgctctggccataggagccgaatggacccagagagatccagacggagccgccatgccagctggcacagttggcgttggtgataaaacggagctcgtagacggctgcaataaaggcgccgacgaagagcaggtccatgaacgcgacgaagattgcggatcgctttgttgttgagaagcggattagcgtgtcgatggcccagaagacggcgattacgctgacgatgaagaggaccaggatatatggtggggtcagcaggtttgctttcagatagccgttcacgaagtaggcctatattcagagacatcattagcgggagactcggaggggtattgctgatcggactggttaacagtggacataccagcatgccaatgattggaatcaggaagacgatctcaaccaggcgattgaatatgaagaacacgctgccaatcatcttgacggttcaaagagagattgggtttcagatctttggaatgtgcaactgtcccgacgtgcttggggtatgtccgaggcgccgtaacaagatcgtggggctacacgagcttgcgaaaaaaagcacaggcagttgcgattacagtgcaggatgcacgttttagaagacgcagaaggataacagaagagaaagtaaaaaggaaaaggaaaatagacagaataaagaggaaatcaaaaaaaaagatattcagcgtcatcttgggccgaggaggctgggcgactcacaacgcacgatgtcggtggctggggtatcccgagtcctccatgatgggtctcggcatctttgatatattgattagtctaagaacctgcatgagcagtcacttttgatccacgccttgcatttgattactccgtatccctcgggatgataggttagggcatgagaatatagatgatcgttgtcaagccaaccacataagtggagactttacggggaactactggactggacttcattgcacttggaaattgcatagaatactatttctgtttgaagagatagaggactcttgttaaattcatgcttggtcgaggcaacaaattcaggttctttgtttccagtgccaacacgctcataatcatattagtacagagttgtatcaccggccaccgcaataatccatggcttcatcaaatcataagcaaataacttgggcaattaccgctctgaactagactgcaaatcatcaatgaccccgtcattcatgtttacatggggatgttcgtcaacggacgccccggacccgccatcgcgtcagggacatggattcccgcattggccgtcagcggctgtgtctgcgacacatatgcattactggggtcatattgatgcgcattgtggtcggggccgggattctgccccatcgtatgaccatgtcgcatttcatacccgctgctaaggtcgtcctcactcgacgaccaagcaccgccgtcaagatcaaggtcgtgtggtcggcgattgtaaacattcgatggatacgggttggaggcatgaatataggtagaggtgtcgggtcgggcatgttccgatctggggatatctggcgggtccatgcgctcttcttcggggttgcggagagcagtcgagctatcttgcctgaagcccttgagtcgaactgtctccggtcctgaaggttcggtcccccaggttcggattgggtaggcgcggcccttgcgccagggttcggtgagcggtgggaaatactggcgatatgcgacaaagccgcagacgattccaagcatcgaccccgtaatcacatcgaaggggtggtgacgcgcgtccatgatacgcgatacggccacgagggttgcagctagtagaggagccatgatgacaagggatttccaggcctcaccgcgattgtccataacgtgcaacttcccacctagccagagcgatatgtagacgagaccggcgaaggaggctattgatcggactgtgttagtaatatgaaagactaggagaatcgcaaaaggtatacacacaactactgtgacctggatgaatttttaaggttagcacgtgcgactctgaaaagcagtactgggtcatatcgcataccagatggccacgaccgaaacccgtctgttaacaacgcgggatcaccggtacaaatcgttgagtttgacaatcctgggaaaaggtctttgctaccagcgcgtggttgacaacgatcaataagatcaggtctcggtttgccgcatgcgttcttcagcgcctgtgtaatgacgaacgcgagtccctgagccagcaacagacccaaaataccacaattgagctcccaaagtctgtccttccagcgatgcggacctcttagcttccgcttcccagacgccgcgtcatgtggcttatggtgcgaaaacaagccatcgataaacaaggtgtagaggatgatgagaacgagtgggaaagcaccggagatgcagagggcgtaaggcatgggaatacgttcatgtacggcgtaaggatattggatggagatgttggtgagggagaagtgttggtggaagggctcgatcgtgttgagaatggcgaagccggcaacgcaggcactatttccatggttagtacggagtaaagagaggaattgatgcacgtacataatgatcacatagtcaaagatgtagctgtggaattgttagttggatttgcggggagacctggggaaagtcgacacacgagataacaacacgcggtcgcagccgccgcttggagaaggggagttttgcggggatttccatgctgactccaaggcttccccaggaaattcgaaaattggagaagatcagaagaccagaggatcaaaaggcctgggagaaaataaacatatctgcctagtccagggcattgcttggcatcggcatgaatagcacctggcggctttcgttctgattggccgtcgcaaagtggctgagcttgtgggacctcagggcgggctatgtatacttcgatatccacttggacattaatacctagtacgggtactgctatatcaggttcaatagacagctagcggcccaaattctcatcccagttcgatatggggtagtggttaacctagcggattttcagtatctgacctccgcggccccgggttcgattcccggtatcgaagttctttttttctttccaacctgtttagtacggagtatgctgtggacaactatttcgacggcattgtatgcgtgaaagatgtacctagtttttgttgcccagccgacaaatagatccacatagttatacatattctctgtggtaatctacttaaaacggaaggagtgaattcatatactaatacacaagctgaagggacgctgacgctatgtgcatgcgtctaactttcaagatcaaccagaaatggccatattttcaaattcaccaaatagacggttagcttttgagaaagactacttccgtatagacacaggaccatcaaaatccgaaaacgagaagagaaaaatatcaactacatatcgacgtgaaagaggcgtcaatggaagtttacaaggcataagaaatggccctaggaatcacatgtctatagtcgtaaacagccaaattgcacagattccgcatttagcaagtggtgatgaacaggccgagactgaaagtgctgttagctgatatacaggcaaaagggaaagcgacgagaaaacttacggagaggggttccagtcctcgaagaagttgaagtcggtgctaccagcattcttcatctcataggtaacagactggccagccgggcaagagaaggtagagacaacgtatgagttgcccggggagacagtgatagtaccgaggtcctgggacaccgagggcacgttactaaaggaggttgaggaatcggcaggggaagagagctgagcgaagtcgatcctgccatccccattaaaggtgtaagacgaagtctcgagctggtcaagcctagggaaaaggaacacgaggctgcaggtcttcccagagtcggaatttgggatgtcgaagttgaacacggtcgaggtggtcgaggtcacgctgccgttaagcccagttccagcaggggtatcaggtgaggacgagtcgacaggaacaataaggtgagggatctcatagttgcccgagagggtagtgggacaaccaccgccggaggtcccagtggtcgatgcggtaggagaggtagggctagcggagctagtgggatgaggggcaccaccggaggtagcggggacggaagctgacccagtgggacgtgggctaccagtggggggaggcacggtagcagagccaccagggtgcgaaccaccactacctccgccaccgccgggggaagttgcactaggagaggtcccaggctgcgaactaccgccagtatgagcaggtacggtagccgagccaccagggtgtgaaccaccaccgccggggaaaggaggcacactaacagagatacctccaccgcctccgcccccgccgccaggggaaggtgcactaggagaggcgccaggctgcgattcaccaccgccagtgggagcaggcacggtagcaaagccaccagggtgcgaaccaccgccgccgccaccgccgggggagggtgcactaggagaggcaccaggctgcgattcaccaccaccaccgccgccgccgggagagggatgtgttactgtaacagtaatagggggctgcggcccggcaccaccaccgccgccgccgggagcaggctgtgtcaccgtaacagtaacagagggctgcggcccggcaccaccaggagctcctggaccaccggaggtagggcagctgcagtcagtgacagtgaccgtggtcgtggcagtgtgagaaccggtaccaggagcagggccaggcgcaggaccaggggcgggaccaggaccagcgccaccccctccagggccaccaccaccaggaccaggagcgggaccaggagcagggccaggggcgggaccaggggcgggaccaggaccaggaccagggccagtgccaccacctccagggccagcgggaccaggcgcaggactaggactaggagctgggctagaaccaggaccaggaccaccagtgcccgagcaggagtcggcagacatttgcacattcacacatccagtgacatccatcttgttaggggtagtgtagacattcataccagcgttctcgcccgtagcacatgcaatgaagtcagggctgttatggtactcaagtttaccctgggagttgacagagaaaccgggtgtagcagtcacaccctcatcacactggagttgagtagtgggagctgtcatatcatcagatgcatgtccttaagtagttgatatatagggcattgattaattcacttacgagtgaggatgcacccacggccgctggagtcagtaatgctgccattggcatcgatgcagtactgtgcgggttgcagattactatcgccaatacggttctggccatcacctagctggccaagtgtaccggaggcaccgccggaggaagtaaggtgaaagcagcagctatcagcgcggccaacgagggcgttagagcccgcagcaaagacagcgacggcaatgatgttcctcatggttgctgttcagcgaatatgaataggctgatcagctagtgaatgaacacggcaccccttcttaagaagatcgcgagcaattgaacgacctgacaatatataccggtagagttgtgcaggtggcttgggttgagggagcaaggttttggggagagtgcatctttataggcagcagtgggggttacgattcaaacagaatataacatcagggcacacatggccggcaaaagtccccgagatcaaacacagagaagttgcatgttgtcagccattcatgccaatgaccgtggggaagaactccgatggaccagtaccctggtttcggagagtagacaatagtaggtccgaaccagccggagcgagatgcgtaggaacatccacaaacgtcatgttgaacagagacccaattgattgaggtgtaaagaaatagagtatgaggatatgcttgtttctccactttaaagcaggatctgaagacatggacaatggtcactggccgggtatgagagggatgtagactcaatgttttgctaacgcccaggcaacccgattgaaagtggcaatatgaatcttcccatagatgactgctaatttgagtgctccaagaggctcaagccattcaattgagttccattgttgttattaggcagttgagagtatattcgtcacgatactcatctcatgctctagtttctgatccagtagctagtaatatcgtacatatagacagttatatgatcctagtattgcatcgaacttctccaaaacaagaaataacaatcatttgatagggctagtcgtcattgacaactgtggatctttgtgccatacatatagaatatagtacattgcatccttcaggtcatagagttaaagcaaaattgtgatacatataaaggatggctgctatgttgtacaaaacctggacttgtgtagcaaagtatagaggcactagtacagcatcaatcacttcattcataagtatgatgaaagacgaaaatcgaatagaagacaccgagagattggatcggattgtccacgggtgtcatcattaaacaatatggaagtggacccccgaattggacccgaccaacaacgccctactatttttatatcattcaaccatggcacatttatatacagtctgattttggaattattagccgcctcataccatttgctctgactgttctgcgcatatttcatatgactgagtcttttccacagtgaaggtttatcatactacagcgacgcatgtctctactgtctctattcatcgcatatccgacgaggctcccaatctaggattcattcatcgtgtcacatttctaatacaatatattgttacacagggagcaagatatggatgtgttcaggaaccaagcaaagtcactcctaatgcaacccgatcaatcgatcgcaaagctgcatcgctgccgcataggtttgatatcatgatacagatttgtgatgtcggacaaggttaagattgaaatggcggatttacaatacatagtaagctactgctttcattaacctcatcttgttattataccgtagcgtacggaatatgtttcttcgctgatcgcctccacccgttagtattgtacatatgccgggcaagtttaaaccgacgggccgtgtcgatctcaatgtgagagtgactgggtagctaagtggggcttaatgaactagagtattttacaaatgacgagtcttcatgcgtcataatgtcgtgaatttcaaatcccagtgccgagacctgtcgataattactactaatgctacatagacagaaatgcagtatccgactcggcaaagaggctgttccagtccacagcccctgagtccacattttcatcgaaaacctgccagaggtcatctagagtaggcaatgcggggtccattagaagctcatcgaagcttctgcctgttggatatgctgtgcttgtaggtgctggagaggcacagacaaggcctgaagaagccccagggccttgagcggtggattgagttattgtgttttcttcaacagccgagcccgaagcactgtgccgacggagagccgttttaagggattcaagcagccttcctgcaaaagggagttcctctttagccctttctagaattgaaaatgcttccaaaatttccgtttcctgttcctgccggtgatcactcccagaaaagtctatgaggagaacaatgatcgccacacagacggaatatagtaagcctggaagtcttagccgcattgtcgcaaaggggaccacctctagtgagagttggcgttcggtacgaatcaccattcgagctgcttccaggcatgctctccgtgagtaattgtatgtaggatctttagacgctcgcgacaaataaggcaagtgaagcctgcatctttgggcatgaagcagaaaattgatgatgtatcgttgtatgattattccgggagatctccaaggatcggtgtttggaagctcgtccgaccgatagtctaacgaaaagaacgagggtagactctctgcgaattcacaaatcttgccatcaatctgtttcgtgtgctcatagtccgggcttcctggatctgaaattccaaacggagcacaatctgtgatttcgcggcaaaattcgcccaatcgaatccgttggagacagtacgacatcgatgttgggtcggtgagtggctttccaactccgaccatcccgtccacaatatcttcatcattcgcattgcaaggtttgttggtcatcatgtggcgtggatcaattgaatatgtgcccttttgcgaaccagatagttgcgacatctgcctattatctgtgaactcgcattcttggaagaataagagggggaggaggaatactcaccaatcagtcgccacgagataccaccacactcttctacatatctctgctttcgcagaggatggcgaaggcatatctagatgggaattgtatggatgatcgatccgatgcaaggaaagttctcttccaaacgagatggcagtggaaaccatatgtcgagcttggggggtaatccccacgatgttagcagtcacaaatatgagaatgatcatcgcttggatatcctctatggattcgaagtgtttgtaacgcgagtaatcgaccatctccgacgcaagtctcatccaatgtgtagactgcgcaactgcttcttcaacggtcgaaaatatggagttgcacatgtcacgttcagcccagagcgacgtggtactggcgagaatgccgaggagcaacgaaacgtgcccaatcttgactggcttgctttctctcagattacaatagagttcctctaccatggtatgcactgaggggatatgaaccacatgatggaggaaagtgatctctgtgatgtacttttccactattatcttcgtttcgtcgtggagtggcagccagatacatcttttcatgggttgagctttatgtacgattggttcagatcccactgcattacggatggggcaagttctgaattcaatctcatacttgaaaatattaccctgtacactcttgtcagtcgatttcccatgattttaatttgatcgaggcctaccagtgagcctaacgatgatatctcgccttcaagccaatttaccgccgatgtggatgactggctttcatgaatcatggatgattgattcgattttggggtaggaggagaatggagtgacgaagcctgggtagtatcttgtgccatgggactagatgctggtccattggtgatcactatctcctccaacctccgcaagcggaccagtatatctgcatgataattgctaggcaatttatcagtctgactctgaggactggaaggcaatgctgtagtgggatagagctgacaagtcttgccccgactagtgcagttggagcaagggaattgccggctacacttgagcttccttgatcgacagaaatggcaagataccggtcgcgagcgtgaagatctaacacgctgtttctcgactccatgcattttgttccgaatattgttgaggcagtgttcgttgagctctagatgtggcgagatgccattacggagtcgaccaatcaaatgccggtgaatccgcggaagttccgtgcctccgcggatttcttactatgggaactatgtgagagacacgaggtatataagagcctctctacactagaaaatccatattaactcatcatccttctgtttcttctacaacatagaatcttcttatctcatttgtgtcaatatggactccatcattgctcagatccgagctcttgcccaaaccaccgatgaagctggtcggttggacatgattcagtccctcacacgattgaaaattgagcttcaatctccaaaagatgtcataatggaactggcagtaccggtcggtgggcacacaatgcaatttggggataccggaagtgctgacagttgtagggatcgacgagtgcgatgctccgaatttgtgcagatctgggactccttcgctctctcgcgagaagtgatgcacccttgactgtcacgcaaattgcggagctgactggagcgtctcctctattactaggtaatgttatctgagacgaccgtacttactttgaattctaaaacaattgttctgttcagagagaattcttcggtacctagccgcaacagacatgattcaagagacgggggtcaatgaatattctgcaaacaaggtcactcatgtcttggctgatcctaagggcgaggccatggtataccacgggtaggctacatagtcgcctccatctagcaaacatccctgcttaccagccttctcattagatacgacacgatgggacctgtgttgcaagcaatgcctgcattcttcgctgaaaacaactatcaagatgtcaccgacaataccaatactccgttccagaaagcccacaacacgaaactcacctcgttcgagtggcttatccagcagccaaagcagttcgagcacctgcaaaagatcatgactgcacttcaaggatcagaatggaccgaggggttcaaacttcttgatgatgaatcccgcaaggttccatccaaggtttcacccactgacccacagccttcggagaaacccttcttcgtcgacgttggtggcggccatggccaccaatgcattgagcttggaaagaagtatcccaacctcctaggctaccttgttctccaggacttgccagcggcagtgcagaatctccctccaattgacggcgtgaaggccgaggcttatgactttttccaaccgcagcccatcattggtttgtctccatctatccattggataatatcaaactgactttccttcaattcaggcgccaagttctactacctccgcagaatcatgcatgattggcccgatgacaaagctgcaagcatcctgcgcaatattcgcgctgccatgggccccgactcgcgggtgttgatcgatgaagccgtgttgccggatactggcgctgactggcaatcggccatggccgatcttgcaatgatgacctttgcgggtaaagagcggaccaagcatcagtgggagtcacttgcagaaagtgcgggcttgcgtgtggaacagattcatacttatgttgcttcaactcataccgctcttctcgttttggccgccaagtgagacagacatggcctagagcggaaatttggacttatctagcaagttattttatcactcttctctcttcatttatgtcacgctatcactccgaacgtaaatcttttttgagatcgatgaatttctactgtgcgattcgtagggttgtgtcgacactagaggtaggccttgacttcgctgaagagcttgggcagacgaagagctcaccttgagctgattcgacattcgcacgatttggtggtctgtgacgcggttatggatgtgtggatgggtatttaagatgaggcgtggcggactgaacacgcctaagaactggtaaatctaagtcaagtgcattatatgatctccattccccacctatattggatgctgtagatacattgatagcaaggacccggcatatatttatagagcaatattctttgctagccacctaaattcaaaacgccttgctagccgagtagataacacaaaatggtaaagtcgctgggggaggaagaggacaaaatataatgagtgaaagagaggactagagcctccgagactaatgcggatacaggtcgtgaatcatgtgcgtgccgagcgatatattatgggttcttgatagggtccactcaatggctgctttcagaggtggtcgaatcatggagtatgggtggtggaccacgggtggtagtcgtacgggtggtaatcgccgattctgctgacaccattcggattcccggcgtccgctctgtcggcgttggaggttcatcattgttggtactttggaattgcgactgagtcggcgtcaccggagaggcagccacgggattgggcacatcgatgtggatcgaagacgagcggtcgataggtgggagctgttgcggctgttcagtctgctccacaacaggactttgatatgcaggggcgtcaccccagtccaagtactcgtaatcgggaggcggagggatattgagcatccccagatctccatcgtcgggttgtgttcctagtcggcccgagtcgtgtgtcgtggtcgcagccagggttagtcgttcaagctcagtagaattctgcgattcgctgatcgacgaagaaacggattggcctcggccggatggttcgaaggattgcgcggagtcactttgcaatagcggtcggctgtccgaatcgttcatgtcagaattgtgcgagtcagctcgaagtcgtgatccatcgtggcgaacacgtccaatttcagcatagctaacgctagcgatgcgtcggtcccgctctctctgattctcggtcaggaccgtggatacgtcgactgcactgttggttcctgcacggcgacgttccgtccgagctcgagtctcggcattgagctgctcaaggcgagcaaaatccccccgcgaccgagcttctcgtcgctcccgacggcgcgtttcgcgatcggctagttcctgacggcgctgcaggcgtatctggtacatcgactccatctgttcctcccggcgagtttcctgttcctctgcagtctccgggtattccacgaccatatccatcccaccacgttcaccctctcgggcgataacttgttcggtcggcttcgggctttgggaataaggtgggagggtcataatcgaacggatcgaggtatcgcggcggacgccatcagtggtctgcatctccggtgctgcagccgctccacgataagaggtattttggccagttctttgattcggaacctggccgtatgatgcacttcctgggccccattttttccatttctgcttgaggtattttcccggaaggtatttcggttcgtagtgatgttgtcgcatataacggaacaggaagtagacgcccacacagaccgcgactgcaaatatgacggtcacgcaacactaagagaacaaggtcagcgttaggggaagaggtcggaagggtcggaaatgacatacaataataactatgttgttcttattcgagtcattttgacgtttttgtggaatgtacataattgttggacaggcaactgagcctagagattcttaatggaaggcatagaacaaaatccccggatttcaagagagtcgaagaatgagaaaaaaagacaaagcgcgtcagcctcggagggtctcagaggtggctggctattattatacgccaagcaatgaaacgttggcgtggccctggtgtggaggctggacaacttcggcctgtcctgaaatcaaattcttctttgtaatttacaaagtggcgatgcagttctctgcacttctcgagcattattatggattcatatcctggccctaatccttgttttgactcgtttccccggcgatcattctgcggcagatccctagccgttttagcctgggatcctttatcatcttgaattatttattgacttggatctcattattgactttcgatcgtgggagaagaactgcacgagtcccttgggtgcaagggaagaccttatacaaaaatagatacgccccttgggttcggaagcaaccggtatgagatcgtgctgagcatcatatctcgatcgcgaatcgtcaatctcccaccgttagggttcattagggcctgctaatcctcgaacaatgagaatcacctcgctaacctcggcctagattgtgagatgcgaatgaggggagtattatggtcgagacattgctcctagctcttcgtgccctttctgaaacactccccttcataggtcggtcatctccactacctgttatccacaggctcccattggcctgtagatctatgaattggtcgtgaatccaaggaaagcacctaacctttcagtgccacgagaattgccgtcccaaatttgtccggtggttcatctattttgggaacactgatatggacgacagcggatggcttcagtgtgccatatttctgcgcggctttgccccatcgcggttgatgttcattatggcccgtgccacaaaggaattatgatagtgtcctcggattatcatgttgtgtcgcttggtccagatcatgacgtggtgctcaaagtataagatcagcaacgacattgtccgggaatattgtaatgctccaatcgacgggctgctcaacacttattggtcggctatcatatatccctcgatatctctggtggctgtactatgtgcttgcagcggccagtgaggcgcagtaaatggcagataggctacagccgtggaggggggtgagaatgtgagaatcttggcgaatcttcacctaagaaggcttaagtcttttctaagtcccagtgacacttccttatcatcattttgaaatgaccattgttccttctgttatatataacagagacaattcaggatatcccgtgatcaatggaagagccgtcttactctcacagtgataaggtgtgggaaacgattgtcaggccctaacttctaatgttacgcaaagtgtgactgtagaagcttttggggaagataataaggttcattctctagctacagacatgctcgagaggcccacgtgaccgtatagtcccagtctagcccaattaggcctagtctatatttattctgccggttatattattctgccaaagttagccgatgacatctcaccgcattgaaacccatggccataggggttgaggccgatttaggcttctcttggtctccgtctgaatcgtgttcgatggcaaatgttctgctatatgagcgcagcgtgaaagtctttggagactggggagtgtagctcccatctgaaatattgagtaatcacagagatgttttaccatgttttaccatgttttggaatttctctttcaggttgtttacagatgtgagcccaggggatgctcttgaaaatcctcgttcttttcccagactccaataccctcgcttaagttaaaaccacaccttgagaaatctgtttactgcgaggctagctttctttccttctcactagaagactggatacaaatttcatacgcccaccacggcctctcaaaacttgataaacttatcttgcttttgtaggagaaaaggccacagattagtctcgttttgctaatatctcacgggctccacgatatattacaagacgtggctgagcgcaatgcaggaactgttgaatgtgagcatcaagagatatatgaagtattacacctttatagttgcctctgacctacactataatgccttagtcctagataaccgggtgagtagagctctccttctaaatgagataggcgaggaaaacgccagcaaggacatccttcagactctccttggcggactccactgagtctgtggatatactggcattgctgagtcactggaccaacttcaacctagtcataaaaagcaaaaaagtgggtagcgggatgttaaaaacttaaatgatagagaggatcaaaattgactatatgattggtggaaggtgtataagaagcaagaccctcaggtggttgctgctgccagaggtttctagtaatcctagcgtagaagtatcagttgagagactattcaacacaggaagagatgtgcttggtctacgtcgattcaccataaaggagagacgttgaggatattgacgatgctagattttgttttgctgagcgaagcgaggcaagataatatatcttacgaaatgtctcgataactcagctcacacgagaacggatttctagccaaaattcaaaattccttttgcacgttggtaagcatagatgcgaggagtttgcagtgcctggcccatctgggtaacataccataggacttgacagttggacttgagcattggatctcagtatttggtgaacaagtacattgaatatcactccactccacccagcccgtgttggatatccaccataccggcgacttctaacgatttatcacctagcaatgggccaacgtcaatgaaacctgcagtctcattggatgcacgaattgagtttgtgacatcgagtgacttcccattattgtcagctgtagaatagagaggtccctaggctgacaaaacgccccattcccccgcccccccgatttgtgtactagtagtcagtagccacttgccgcgattatctaagactcagcaggatacctaactaactagttaggtagatctcggcgcttctccgaacagttacactcattttacctcttgggccaatattctactgtccgtaccatagaaaacagtcctcactttgttcatcaccttatctctccgaatatttatcttaatctgctcaaataagccacaaggctcaaggttatcgtagcattacttcaatgggtatcttcattcctcgggcataaagattgcgataccatggcgtacgtaggtctaccagacccatcgttacaatatatccacttcaaatggacgatttggcgggatcgggatctcgggatccaaatattttgcgggaaagagatcgacgcgcggaacaaccccgttcggaaagacatcagcaagtacaatagcccatgcgccttgttctgtaccagcggggaacacgccttctcgaattgttgttcatcggcgggctagaatactgtattcaaaatctcaatttggaaggtgcagccccagcctatttgccattgccgcaaacctgcttttcggttttcttctttgatactgacttgctcacacagctatacatattacgtacggcctataagcaaaagttcaagaaaggaaagttgagcgtgaataatcctttcccatatgtaagacaggtgtcgatcgatttgacgtgccagggttctctgggtacccggatccatctccgcccgtggagctagcccgtgtggatgaaatcccggggcgagcaattacccgttgaggtaatgtgagacttcaaatccacatcactgatcggccgacagagcttttgggaataaaataggctgtaaaagctggccttgacgaatttctggtgaggtgtatattattctgcccctgaaatcacgcatatgaatacgggaacgagcatttacctgcccaagcaatactccatacaagccttccgattacattgctgatggttgtataaaatagaaaacaagtcaaaagtggaaacgataatcagagccaacgcaagatttagatacaggtgacctttgaatgggaaacatgacaccgaaatcaattattatttgatggttctgggtatacaacatagtctttagtcatatcacccgattttacgtgaagctatcagaacgggtgccggtggctgctgtggtgcgaatgcgctacgggaatgcaagccaagggtgacttcagtgcttcacgtattggaatgtattatattgtaccgtttcagagaaaggatgcgcccagtttctgcaaatcctccatgtggcgtggtatagctgatgtctaatccgacgacccagccagccctgaaagcttggcgcttattgctgaaagcttggcgcttattgctgaaagcttggcgcttattgcttaaagcttggcgcttattttgctggccacgccggatgagaaaccccacaccaacaatgagaccatttgatcgagatgcatcactagactagggagacagctcgctggagtttggctatggcatattatttcgaatcggttctgtcttgactaattgcgctacaacgtatcttgctccagagggcaatgccggaaagtacgaagtctagatacgtaggatcaagctttgatggcttcattgggagcacgtggaaatgaatgcgacgtaacaatgtactcaatagcttcttcattgcacatgaagtcggtctacgaatctggttagagtgcattcaagttgactctgcggcaggatagttgacagaaatattgagttaaacgcttatacaccttgactcaaaaaggaaaatggtgaatttactttttgaaattaatggaatggcggagtaagccgctactgggcaaatttgacttcaatatgtctcaagacatttcggaatttcttggtatcttctccgtctctgggtcggcttcgagatataaaaggcgacatatgtcccagtgaaatgcgaacatatccaaccagacatcttctcatctcccattccaattgtcttacagccatcttccaaatcaggtaagtgagccttgctttccacttttatgagatgttcgacattcttacttgatgttcctagcaggcagccatgttcatcaaaccactgtcaggtattgcgctgcttctgcatgctgcagcacttacctccgcggaatttattgtcaaaattggatattttgggggtcttgttccaggccttcctagcaccgaacctggtgttggatgtgggctttatatgacaggaatcgccgaggggcaggcactttcggtcgactttcttccggaccatcaacccacggatgactgccctgcggctgatttggtactcttttgttcgagatggggatgtccgtttgagacaacatttgaacatcttgtcgaggtcactgtcttatcggacgattccagcgacaaatcgattaccgtgacagggcttgctcttagtggtaggagtgccacggttaagtgcccatggacaccagtgactatcggtagccaaggaggcctcggtctataccaggagtgggtatgcgacctgagtgcgacccaaggatgaagagcaggtggttaagattggcagttggggttgctcaaaaccagctgacgggcaactgaagttttgtttcgtgcctgcgagcctatgttgactgttcaatcaaagtgatgagccaggtggaaaccaaatgtctgtatatctttgtatcggattttgggttacgtgtggacctgatcgtcatgaccgccgggttttgtttgtgccagtgtgactgtctcgtctggcaaatggggatgctctcaacagtctttctctgtttcatttcagcgggtcagttacttcttccatttctataagccacagtatgtatgtacaaatggcttcacctaccctagttctagatcttgagcgcagatggtgtcttctttgaataaattgtcttttgactctgcaggctggtttttatacagacaaggattatcaagcttaacaaaacaagatagaaccccaatgcgtaggctccggcaaagcgcgagggccgacccgctcggaggctaccagtcattaccgggaccgggtaacctggtgaccttggcgacctggcgacctggcgaaccccttattcgtcgggactgacagctagaatttccagcaaaaactcaaaagcatcgattagtcaaattgaagtgtgatgatgattcctgacttggcccttgaccattgtcgtacagccacctttgatagaccgctacttatacatggtggcgaaggtctgaggcacaacattacttgaaaaagaataatccctagcggtgcttagatctcgcttattcacaaatatcaggactaaatcaacccaagtgcagtgccttggttaatataacgttcgtcggatggttttggtaaacacgtggatgctagttgtctcatttgctgcttttggatattgctagacgatgacatgtgatttggaaatggggggttgacttcgcataagttatctagatagataccaacattgtagaaagaaaaaacatcaagctgaagcaatccgtgtaataatgttcaaactccgaggcatggggcgtggttctttcagaacttgggtgctggaaaaaccatgaacttcagtaacatattaattgcgatcgtctcgtggccgtacaggaatatcaaatggtcgtgctggccaataaaatcaaggcgtaaatgacctcacgcatcccccttgaccgaactgagcgaggatatcgcaagtcggtctccttgaaggtcaagtattcggcctcttgatccctgaatcaataggattttacataatggttaactcgaagttgttccccgcataaagagactaagctgaataggtggtaattgaatcacctgaaaactcagcatgatcgcgccgtcccgcagttgcttagatcgacatcggtatatactgttgttgatatcgacacgctgcttgttgtggacgatgatcgatatgtccgcttaaatcagatatccggaccaatggggtccaagctacctcctccgacaaagttgaggtcatcgccacgttgcatcacagggtcttgtcaccctgccctacctggggccatgagattggcatgaattcaacaaagaagttgagcgataatatatatataatgcgaccctgttgcaaactgaaacttcggtaacaccttcaaaccccttggcagccttgtggatcttgatacggctctcctattggacttttacgccactcatttaagatctcagtccacctgaactctcaaacccctcgagacactgatatcgcgcaaaatggcaacattgaactttgatttgaaaaacagcactggttctaacacggtctacgcctatattacaggccaggcgcttgataataacaatgcgcttttcctcttgcgatctgatggtaaaaccgcctactatccgacctcaccatcggccactggggccgctctgagcgaggattgtgcgattccgttgggtgcgtctggcaataccatcaccattactatcccgcaccttgcaggcgcccgactgtggtttgcgcaagacaacaaattgacattctttctgaatcctggccctgcccttgttgagccttcggtatccaacccatcggacgctaactacaatctgatgtggtccttttgcgaattcacctggaatgactatcagctttatgcaaatctcagctacgtcgacttcgtgtcgatgcctatcgctatgactctaaccaacggatctggtgtagaccagaccgtcaagggtctgccagccaatggccttgatctagtctgcaatgctctcaaagaacagaacaccaaggatagtgccggctgggatcagctcatcatccagcacaacggtgtcaatttgcgggcggtttcgccaaacacgggaagagccctcaataattctttgttcgacaattactacgggagctacgtggatcaagtctggtcttactacggaaacaatactttgacagtcaacacgcaagctgccgccggtgatgtcaccgccaaggttgcctctgatctcttgtccttctcagttgcaggtatttcctacaccaagccgtctaccggagacatcttcagcaacagcagtggatcctttgctgtttctgggaatagcaccaaagatgccgttaccgctcgtcttgcagctgcgttcaaccgctcaactttgttgataaatagcgaccagccgaacggggagtcggtttcaaactactacaaaaaccctgtgacgaaccactacgcccgcatctgtcattctgtaaacattgatacccgaggctatgcgttcccctatgatgatgttgcgcctaacgatggcgccgatcagtctggcagtgtttttgatggcaatccaaagctcctgacggtcaccattggcggcggctctagtaattctgtcaagcagtctgccgttgaggacaatgctacgccaatccagcgacctgtggagaatggacaaagcaaggagagtggaaggaagccgagccgcttccatgagctgaggagctttgtgaataagctgtcgcacaggaagagcaaaacctgagaaacataggcttgtctcagcgctatatgattatgctgtcgtatattgtaaatgctaacgtatatatgtgaccttcggtcgtcattctgtcttttgaattcgttggaaataggagaatatgattctatcccttgcaacatacaagagagtaaggtgcctgcaaattgatgacctgcatcgttgtaacagttccctctgcttattccctagcatgctttttaatgtaagcaaccacctgatccggcatagccaaccagggcgtgtgtccggcattaattttctcggtttcaatttgtgcccccttccgtcgtgcccgctccaccaacacctgctgaaccggcaacggaatcgcgcgatcatcctcggtcagaagatatgtagaggggatgttcatatacgctgcaccagtagcgggcgcgttcttagtcgcccaagaatgtggcttcagaagcttgacccactccgcaccatcaggaacatcatggaaaaacagcacgagtggatcgctggcagtcacagttcccttctcttcctggaataaatgtcagtggtcacatagaaagtttgcaaatagaagtcggacaacttacatcgcgcacataccacggcgggggcatcccaccaaacgcgccgatcaaactctcgccaatgctgggcaggaaagcggcaatgaagatgagtttcacgacgccgcccttctggccggctgcttcgcgctctgacctgctcagcccatctaacgcgctgctcactggtaacccggcccagctgtgcgtgacgatgacgatgtcatggccagcatctgcctcctgttgagtgatagatctcacggcctcgatatctgactgaaggtcgacaacagagctggcttgctggatggagggaaatgcgatactgtggcagctatagtcggcgaggtccttgatgattgggtcgaagatggtgggcgggcaccatgcgcccgccgcgaaaatcagagttgtctttgacattgtcgccccggttaatgtgaaagctatatgaattggatacgggcgcttgctctgtgaaatgcaagcttgtaaggctgagaggttgcagtggtcatggaagcgaccatgcgggacttcattttcactttaattttaccgcttttctctcccgtctgaattaatatctcatccacatcgatgatttccattacactcttggttattcatagcagtgacatctttacgtggtgtcgcgggttactcgggtatacacgatgacgcaaattacaatgatattggccagtacaggaaccagtgaaaggaaatagacaatgtgtacggagtatcgagaccaagtctcaaaggaacaacattttgaaacaatttaacccacttcctcggggtcactgagcaaggcatgcaacttgccaccatccatttttgccagagcctggtacggtccatcctctacgacagctccctggtcaagaacaacgacatggttcgcgatctcgatcatttccttcgagtgcgtgataatgataacagtaagcccttgacgcacggccactaactgctgcactgtttgccggacgatctctgcacccgctggatccaagctggacgtggcttcatcgagaatcaagatttgaggttgacgcaagagagcccgtgcaatgaccacacgctgtttctgaccacccgaaaggccaaccccgccatctccgatcacagtattatatccacgaggcagagaggagatgaaatcatcaattcctgctccttcagcggcagctcggacactatgagatgaggctagaggtgagtgctgatctagcccgtaactgatattttcatgaatagtgccggggaaaatggttggttgttgcgatacgatggagatctgtgagcggagagtagggacatgcagccgaaggatgtccgcgccgccgagtgtcactgtaggctgtcccatttcggaggccggagcttcgtagagcgataatagcagcgacgcgattgtggattttcccgatccggatcgtcctacgagcgctgtgcatgagttgcgtgggatggtaatcgagacattctttaacaccgatgtgtttggccgagagggataacggaaattcaggttggtgagcttgattggggtgagctctgaaacaatcaaactaccgaggtgctcgtgggatccatcttgtgagagtttcgcaaggcgaatgagctgtgtcgctacctcacgggatgtgttgatttggggaactatcaaggcgtgagttgagtgcttcgaagtgtttcggggcctacttactccatgagagaatctgagcagcgtatccaatgctgaaaagtagcatcgagaataccatcatcacatcgttcacactgaactctcgggatgctgcgagaaccgctccataatagaatatcaaagctattcaagagagttagaacaatggcaaacaataaataatcagcgagcttacctgtagaaaaaatgactgttgattccaccataccgaaaagcatgcctgtatagatagcacgtttcagccccagcaacaagcaccgtgcggtcgcatgagcttgtttgcgatggaagtgaccttctaaggtcaatgtcctcacggtacggatctctgaaaaggtctccgtaaagacatcggcggcgatactgttcgcgtcattgcatcgtctttcccatagcccatttgttccctcgaagcctcgagtgatgatataaatgacaggtccacaggaaagagcaacaagtgtcaacttccagcaaacaatcaagctccagataactgccatggcggtgattgctgctgcaacgatcacaaaaccggcaaatcggccaagcaggtttcgcatgtcttcgccattttgatcgagggacgatgtgagtctgagagatccgttaccatctttctcaaaccaggcgcgtggttgatcgagaatgcgttcaaaggcatttttcctaaatgaatccatccaagcctcgccgcaaagttctaggaagtaatgcatgaaaaaggacgcaaggccatcgccgaaagacactcctaagacagcaagcgaccatgtcatggttaggtgttcgctgttatttccagcatagaaggttccaaacagctgcgacaggcaatatgagaacaacggagttgcgcttgcgtgggccagtgctgcggcgaatcctaggaagaggatgattcgctgtctgatcgtcaaggtcgaaggaatggtgcccataattcgagagagcggagtcattcgttctttcagtatcttctgctcttttgacttcttgcggcggccatgagatctccggctgcgcttcgcctctgatggatttttcgcggtgtattcattgagccatggagacttcaggctctgatcatcaatgtgaaccatttcgacttcttccgtgggaatttgaatggctatttctttcgagtcccattggggatcaggtccttccgtcgtgaaagaaagacgttggctccaatcttgcaagagcgatccggggaactgttcgttcctgactacatattcctccttcctccttgaggttaagtccagtgagcctgagcgaaaggtcgggggtatgtggccttgaacccaggatgtcctagctcgatgatgtccgagaaacgctgttggaggtctgaatgtatccaagctttccgacgatgagctctcccatggtaagtccatatcatccagagctctttcattcttggtttcaagatggccgtcgactttcgtatggaagtacttctcactctccggactgacctcgacagcgtatctgtaaccggatttcacaatcgaaccctgttcgagaatgtacaggaaatcttgttccataatttgtgacatctcgtgagtgatgatgatggttgtctttcctttccgccactcacggattgccttcattattgcgactcggttggcatgatcgagagcgctggtgggctcgtccaggatcagaattggggtgtcgcgtaatttcgctctggcaattgcaactcgctgtctttggccaccgctcaaaaagcttccaccggggccaacgcatgtgttgattcccttggggagaccattgattgtgctctcaagcatggccaactcaatgggatctttgacatcttgcttagtgacgctttcatgatcctggcgaccgaaggcgatgttcgtgagcacagactcattgaagagaacgcttttttgctctaaaagagtgatattgttgcgaatccagttgatgtcgagtctttggattggattgcggtcaatcaagatttcacccgaggttggcaagtagaaccgcatcagcagttggctgagggtgcttttaccagagccgcttttccctataacaaacgtcgtttctccagcggggaagaaaaagcttgacggtttgagaacgcattgatcgggttgactaggatatgaaaatgataccttcatgaatgttcgttagtgtccatttaaaacccagagaagagttcatactcacgtttttcacctcaatatcaccttcacagtgttccggataccgagttccctttacctcgctgacaatcttgtcttctctccggctctgtattatcgatctcaaggcgacaccagcgacccttcccttttccatcacgatcatctgtggcaacacctgctcgatggattgagctgcggtcagacaggcccagaaagttctgagaacttctccggatgtgagtttcccggcgcgtgcaagggaactgccataccaaaatccctgaacaaacatcccaaacatcatccatcggatgatagcaatttgcagagaattcagccgagcctgtcgaaggtaatgtgtggcagaactctcaatgcgctcagcaaaattccgatgctcgaacgcctgcccattaaggcatttgactgtatcgatattggtgatagcgttgttagcaaccttggaagcctccgtaagctcagcctgctgtgccgtaatgctgaacttcattttggaagacagatatacaataattgccgagaatatgggaatgcccgcaagagttaccagagagaggctccatgatgtgtagaagcccagccccagtgaagccagcgaacggcatgagtattgcaggacaagtccgagtggctgcgatgtcgccatctgcatttcatggatgtgtctaaaattaatattagatataatattttcaacgagtattgtcgcaaactcacgcttgaatccccgataacaaagccccggagccctcacttttggcctcaaaccactcaacgtcgcgctttagcaactcttgaaatacttggctgcgaacaatggaggcctgcatttccccgaatgcaacgaacagggcatagtatgcaccgttcaagaaccaaccagctatccccagcgcaatcattccaaagcaatttgtgatcactttgccatggagctcttcagcatcagtctgaccggctccgaaagatgtgaacgagtcaaacacattgccaaggaaaattgcaagtcctggcgtaacacaactggcaaccacggcgaagatagatccggatatcagagtcggcaggtgtcttcgagtcgtgaatccgaacagtgatttccagcccggattgcgctcggggatattttctttgttagtgtcgttatgatctgaagtcttgcgttcgggcaacattttggcgacaggctcgaacggcacgttgaaggcctagtatgacttgtggagatagtccttgtcgcgctgtagtggcatagcagtgaggtaagatggaagaggatacagatcgacatgaaatggccatgatgggctatttgagtgtgaacccagatacataatccaagagaaagaacaatacttagaaattcccaaatgcggcaatattgaggaggggtgcagaacaaagacacccatgctctggcattgttacgaggcacctgagatgaatgtaccattcatcgacttcaaccttgagacagcaatcatacattgccttcacggttggtagcaaatctctaacagtcaaggaaacatagggctagataacttactcaatgtttgatgcacgatgaccactatcacccgcaatgattgctctatttcgaatcagatagtggctcagaagatagacagaggaccaatggaaatgtcaatttatttagggtatatttcggaccaaatgttgaaagactgtcgaagtcctagcggacatccaatttacatttgagtcgcgattaatggtccgatgctaaatcagaaccacatatttatgggtatgaccacgcttctatcgtaacaatattaacctcaagacatgatactgcaagatcatgtaatcagcattacaagtctcgaggccattcatcatctgcgccacaaggaaacaggcaaaggccgtcggccagatcagcccggacggatgaggaactgtcctcgatttgtaggacagcagcaatgagacacgatttgtaatcaggagctagccttctgggccttctcgtaaacccaatcgttcaggccggcgcggtttctagaagactccatcagtttctatgcatgattcactaagctccaatcagcacttaccgagcgatttcgatagcgtagaactgcatgcgcacaccgaaaatggtggtattttggtcgtactcgacatccgcacgggtacggatcatggtgccaaagttgtagtcctcgatctggtcccacttcatcatccaggtgcgccacttctccttgccctctttgctcttcatctcgtcttcgacaagagttgcggcgggatcaaaatcgggaaatgcctctttgaatgagtcgtaaatatcatcatcctgcttggtcaagtgaagcgtcgagcccttgaccttctccagaatagaccagtatgtcatgagatgttcaaccgctgtaatgtgaaagaatattaatattataacttttaaaaaagctgtgagtgagatgtaaatcaatgcgtggctgacctttgacggcgaactgcttctccatctgttgcgattgtcagcgatcaagattcatcggtctttagtatggacgtggggtcgtacatcctccaaattctccgcctcctcggggtcgaatggtttcgccatagtggtagttgtaatagtaatgctttgagatacaaagaaagtagtaaaggcagtgatatgagaaatggaaaggaagtcaagttggagtgttcggtgccccgcgcatagttttttgacgggcggagagcagcctccgcctacacccatggcctgatcgttgacgtcattccgcccgcagcccacgggtataaacgtcatgttcggctcaattaggtatacctagtataacttgctgttgcatgatgttaggggttttacatgtaaaacttcgccgttctttgtgcattcgaattctgcaagaagcatagaactttcctatgtataaccaaggagaaggacaagtttaaccccacatagaccctgaattaacgccagcatcgctacagagttactatagggtatagtcatagaatgtgcatgcagtgaatcacagctcaaaagcattgcttccaaatgagtcttcaaaaggtaatgctcagtcactatcagcatcatccggtagttcttcgaatcttccctcgtggagagcctgagtcaccgggttctcgacattaaggagaccatttgctttggccctgcgataaataattgttagcaatggctctagatagctcgtttacgatgcacctacctctcaaacaacacaaagagtctctccgcctcgcgctccttctcctccatggtcataggtggaccggtgtcctgtcgctcagcggcccaccgttgtccagtgattggattgcgtgcggtttcagggtcctctgtagctgaatatgcctcgcgtgcactttgtggcatctcaatgccgcgcgctgccaggaacccagcagcgaagccgtagccaatattcttggtgagtttctcggaatccttatctgatagaacaaacatcagttccgaaattgtaactttcagattggtaaagtggcctgtcgagagtttcagcagtctcgaagaaagtgtttcagactgcccaattggcaagcttcggtcagtgtcctcgggcagaagaagcgactgcatatgcttgcggggttcattgggtgccacttcgtggatagcgatgagtgaatatagcaaggggactgcgttttcctctagctccttcgggctatatatggatgtggcctgatccaagatgctgatcagcttgtccatgttgcagttgttgtcaaatgccgggaaaagggggctgctctcgaaggctttgcctttcttttcctccaagtcaaggatagacaatgtgttgagcaagccgccaactaaaccatcaaggggttttgctgggatatcaatacgacatataatcttcaaaatatgagggatggaaggggagaactcggcagcaagatccggaaatatcttggagatgttgtaaatcaatttcagagtgtccgttaatgccagttcgtccatttgtgacaatggttttcttcctgacttggggaactgctttgcatgacggctcaattgctatactagtcagtacagcaaatcaactttcgagtctgtcgatccactaacgtagttgatattttcccccaaggcgtgacttttgatcaagtctttaaagtctagtgtggtgttgtaggtcgcgtagaacaatatgcggcttgtaaccatctcgtcttccgagtcttcggtctatcaaacattagtgtcagctttcgtaccaacaatttacctgctgtagccataccttgagcttttctgctagttttccgccgtatcccgtgtcgacaaaagcctggcgcattttggggtccagtaatagcgcatttgcaacacatcgcaatgccgctcggcgtacttcaggagtctccccctcaacgccataccgcaccaatgtattaatgccctgaaaatgatcagaatccattgtaattctcattttcgacgggcaacttcatctgttgtgctcatacattctgtgaatagatcggttctgcgttggtagggttcgtgccatgttgtcggagctgaaggagggtttgaactcggtctagtagtagatggtatcggtattaggcacgtaaaatggctatcgcagcggactgacctgctgttgagaggttgttctcttgtaggtctttctcaagagactgtagaagctgtgtcacttgttgtagcttcgctgtatgtgcaagctcaagtcagtcaatctactggagattagaaagttccgcgacggacctgttccttgcatctgaagggacgacatgttgatcttagctcggactaagtcgagtgttccgagtacaggggtgatgtaggactgatgtcacttccacctatgccttgagctgagatagaatttctggcacagtattagagtaagatttgatcagatcagtagcttgagcaggtagggcacctacatgtaggtatgcacaagagaataaaaagaaaggagagggaggcgcgcgggaaagtcaggcgcgaatcgtcataaattattcggccaccccccctttaagcttcccttaactgtagcaatctatataacaatgtattcctacataattatgagaaatgccctatcttgcaccacttgattccagatattttgtataatgctttttcgaacttttccgaactccgctggttgcctgaagaatgtggcagtaatatattgaagtcagacatttcatgctaaattttgaccgctgaacactgatcgttgttgctgattactacatactcacacactgaaatactctccaatgcctttgaagctatagtcaatcgcatgagagagtccacgtatggatgcctcgtcgcctcaggcggcgacactttacgcgcatcgcggcgcgtcggaacttgaacttagttttctcagcttgatgtggcttcttgattcttcagtctgaaacagatcatggacagggcctgaacagcatcttattcagcaatgatccttgactattggctcttttcccctttcacacttcttgtccgattcaaatcatggtggagatcctccctgctcgtccgcccacacccccaaggacaacttcgcgcattgtgattgaaaacgccgagtcaccaccagccgttcaaacacccaatgagtcaccattttccgcgttagggtcggtgcaggttggtccatccagccgcagttcgaagaaagtgaatttctctccatggcccaagtacatcaaaccaccaacatttgctagtgccatgaaatcggcccccgacttcaagactatccctccgtctccgaactccaagcctacgaagtcgatcttgaaagcaacccagtcgccaattcccgtttggtcacccaacgtcgatacattcaccgccgaatcgcttgccatgctgctcgaatcagtaatccaacagctggctggcgagtcgatgagctcccgactcgacgcctacatgcaattttatggtgcgctacgcacttataacgggcttccagcgggtcagaagattgccgaaaaattgaatctcatcaccgagtttattcagcgagatgtgaatcgggactttgcgaacggctcccttctcgacacaaaccttgccaatcaagctctgaaattgtcaatctcgtttgtttggaatccggagatttcgacccagctttcggaagagttcaaaatctttctggtcgaccattccatcacttgtctccatgaggccaaggccccaaagtccgttttgatacactacatgtccatattgtctaatcagagctttggacccaagattatgaccggtgctcgtgtagcccgccttttgacagtactacaagacataaataagaacatcagtggcaactcaattgtttctcatcgattgaacatttaccagcggctgctgggccaagccaaatccgctttcatctcccaagcaagcctgtggatggaaaacttgatattcgggctgcttcatactttgaaggatactaggtcaaaatcgatttcatttggcttccaggtggcgacagacgccggtccaaatcctatactgtcgaaaaacatccgggatctctttgaccggccattagagcatgaccgaaagcttgtgtccgagattcgtgagcgcatgactcgaatgatggcgacggatagcggtgagcatgttcctcaaatttggagcatcattatccttcttctccggagcaaaagatggaattttgagcaatgggaacattacaaggaatgggttctcgtactccaaaaatgcttcaattgcagcgagccagtgatcaaagcgcaggctatcgttggttggaatcgatttgtctttgctgtcagccccaacgaatcaacgagccgatctctcctaaaaatgctgggcaaaccggtactctctcaattcgaccgtaagaaggccgacaagtcaggagcaccgcccactcaacttgctctgacaagctactacaatctgttatactacacgtttcgcccttcagcttcttatcagcacctggatattatatgggaggaatacgtggccattccgtctgcaggcatcttctcatcagccccggttctcagtgactgtcttgcgcgcatattggcaaacctgctgtggagtacgcaggctaagatatgggtagagaatcgaatcaatgatactaccaaaatggaggcggaggaacttcctgcagccgacagcagatgggtccgatcaagaattacctcgattctaaaggtttttgagcatatatttaaagcctcggtctgggttgatggcgcggttggccaatctcatgtggcattggcctggagtagtctatccagtgctctatcgattgcgtccagcaaagagatcaccccttcgggggaatcaatgcaagctgttgccagcgtttggagtctaatgcaccgcctttggaatgcagggtcgccctcattgaatgccggcaccacggatgagttcttcgaaagattcagattcttgtctacaacaatgattgtttcgattgggggtattccgtttaccgaaaagcttctcttgagaaatgcggatgagactgagagcatttccatacattcacctcctaatacgacccaagaaagtgctattcttcacctccttcgaataatcagcagcactgcggggacaatggtgccaagccaatcttataaactccttgtcttatgtaatattgaagcagcatgcaacgggagattctcccgaggaactcgcctcgaacttctccaacagtgtgcagaattgagcacttcgaaggccagtgctattccacgagcagctcagctttcggaggtggtttggaatgccactgcccaggtggccgcagattctttgcagtcgttccccatggaatccgctcgtgggcgcgacgggtctgtatctcgtgactacgaaaatgtcattaagattctctccctcggactttcgtttccatcggctttcgaagggtggtctcatttacttgaaacctttgttcgcgtggttcgaacagagaaagggaaccaagcggttgccactatgattgtggaacccatggccgagcgcctcatgtatctttgcgctggagatacttacctaccctcgacttcactgcttggtcattccttatctatccctttcatgcaaggaactgggctagggattgatcgcagcggcatccaggcagctggacatgtcatctttcctcataaacttatcgcgtcgactgcgcagacattacatgatgcatatcacaatttcaacgcatcacaatcccacggtcttgccgacttcatcgaggcattgacttctttcctggggatcggtgttccgcagttccaatcacaaattcttcaaaatctccagtcatcccttggtctctggttgaaggacgaatcttacaaaattcacgttgaccacggcgttgacagcagaattctgacagcgtgccgtgcgctatcgtcagctactatcaatattctccaaaaatcagtttcccatgatctagcttctttgaaaatcttcgagccgattatttgcgccggtttggagtcttcgcacatgtcaatagccaagagatatgtcgaactttggggcttgacctttggctcacagtctttagccactccagtcaccattttacaagctgtacaaactgctagctcgaggttgcagaccgcaacattgcctccgcaagacggtgatcaggataccgagatgtcacctccatctccgcaagacaagatgaatcggtcattgcatcagccgtctcaggacactcagctttcgtcccccgtcatacggaccgaagactcctcggtggccatcaagccaactgagcagttccatgaaccccagttaccgagtaaccttcatcagcccacggatgcgcaaattattgatggtgtttcagtgtctcacaagcgcaagagccgtagtgaaatgttttcgatgattgaatccattcaatcttcgtcgcctgctagtacgccgcggaaattgggcttcgatactcctccgcatctgcccaaactacatggagaatcaaagaccgaacttcctctaacgcccactctcgcccctactgagaatgaagaaggattcatcggctcttctcctactcctggaaccagagacccaacgcctgctatgaactccgacgcactcacatcgggccatctacttgcggatttgggtatggaccctccatcttctcctccagatatgcaatctcggagtccaagccctcggaagagtcgctcgaaaagtgcgcggcgaaaggctgcaaaggcaagaaaggctcttgtcggtatctccggcaaacagtcaacggtcaacagcccggctacttcccatcttgcaacggaaaatatagatacacctatggggaatgcctatgactatgataacgaaaacgccgacactgcacctcgagtaaatggaatgactcccagccggcaacttcgatctgcgctaggtaaaaacccggatacagaagaaccttctgcggtgccactagttgattctgataagacacctgtccaacaacctactcgcagaagtaaatcaagctcgggctctaagaaaaaacgaaagcaatctcagtctaagcctgcagatgatcgacctcaggaagccgcagacatgccttctgttatccctccggatggtttcatggactcgagtgaggagacagagacacaagtcgcatcacagcttggacaagacttggaactagcattggatatggaggacagaggtcatctggagcgaacaaaacttccggacgagccatccaggaagaagagaaagcggaatcaaatggaatcatccccaactatgagaactgacaggcgccggtcttcaaggctgtccacagttaaagatgtggtcagtgtcgagctattgcagcctgatgactcacattcgcaccatgtcatttctcagtcggcctctccagctccatcattatcaccaactgcaactcgccgatccacccgcagttcacaacgaaaatatgctgatgacgcttccacggattcagtccctgcaactcagagctccgttgtgcaggaatcaacacaagatgccgagaccccgcggccgtccaaaaggactcgtaaatccattcatcttgaggaccagtctgtgtctagcaccatcggtagcactcctcaaggcgtctctcgagatacccgctcccgcaagacacggcatcagcaggcgtctcaacctcaaccttcaagcattgcatccgaggaaaatggcgatactgaccgcttgccacctgatgtcagcctagaccggatccccgagagccttattacagaagaccaagcgggccagaatacctctcttgtttcgaccgaagaggcaactgccactcaagtctctgaaagggagcaagccattgagtttgcggtaaaactagatcccgaggaggacatcaacatgaatgccgtccagcaatctggtggaacagtcgagcaaactacaagtattgccacaacgggtactcaaacccaagaaacaccccctgaacccaaatccgacatcagcgaacaaggcatcgtccaatccctgaagaacctcttaggtgaaatgaaaatgacgaccttgtcaccgagcgctttccgcgaagtcgatgatctcctcttcaacctccgttgcgaggcacaaaatgcatcaacgcgacacaatacttcagcatagcgaatggcgtttacagcgaaaacctgttggatatgaatttttttacattggaccccgtctcatcattattccccacctgcatcctatatatctttataacttgaagcacatcccatattttattgtttggcacgcttgatcccaaattatttttcttgtacgttaagttttccgcgctccgagctttccaaacattgaacattatgatcttcgggaagaagtacaaggacaggtttctatggatatttagttcactcactcacttccatatatttccctcggccatctgctttcgctaacaatcaaaacactccattcatagatattagccagttggagtctgacccgaaaggttcaggtacagcttacttgaatgtcatggtgacgcataccgccactttcctaaatagtatatcaaaccagtcctgatcaatttggcaaaacaggaatcattcaaagcttccgcaatcatatgtacatactgacttgactatatttgtccaagccatggccaccccaggcactcagtatatgatgcaagcctgcctagcagccgatatgtcaagctcaccacaccccaagccggtggacccttatctcagcgacccggtcagcatgcttccacccggcctaacacccgactcgaacagccgaatcaccttgcgcggtgtgagtggcaaggatgtacttattccctgcctgagtatcggcgcatggtcatggggggataaagcaacctttgattacaacccaacaagagacctaccgcgcatccacgcagcatgggccaagctcaaggctgttgggttgaccttcgtggacacagcacaatcctacggcgacggtgagagcgagcggatctgtggaatattgttccgagacatgcctcgcgactctttcgttgtacagaccaaatggttatcaacaccagatataaccaacacagtcctgcagtctggcgggcccaagtctaagcttaaagattcgctcgtgcgtcttcaactagactatgtcgacatctatctcgtccaagggcctatacatcctagcaagatatccattgtcgctaagggcatggccggctgcgtgaaatccggaatggcgcgcgcggttggagtggctaactatgacacaaatgaaatgatcaagatggctgatgaattggccaagcacgatgtcccactctctgtctgccagtgcgagtactcagtagttcgtcgcttacctgaagtcagtggcttgattcgagaatgcaaaaacgcagtatttgctttcaagggttttcctcgctagccgagggccgtctttctgggaaatattcgaccttcaatgagccgcagcaaaggcggcgttttagcagttatcccatgcgtatgctggaacctactatcaatgttttaaagagtattgctgaagagcggcatgtgtctgttcctgctgtcgcgctaaattattctatcaataagggcgttctcccactggttggtgtgcgcgatgctggtcaagcggagcaggatatgcaggcgcttggatggcggctgacggaagatgagatcaaacagattgaaggagtcagtctacagggtagaaggtcctcctttatgcagcacgggtaggtattgaatatatgacaacattgcaaaaaggacctctgaatttccttggtcttactcttgtcgagggtctcctcccaatggctttcacgatgtctagaccgaagagctttgagctttcagttagaaatagaagagcagagtatgactctaattgcgtccttactaaacccactctacctatagtatatgtcgcaatcagctgccatgcaattgcgcaacttcatgccaagaaccgcgcccttggcaatcgaaggggtttcgactgtttatcagagatttcacctcatttggctgaaccctgcatccgcctatcatgaccatgagatgcctgcatgtcatctcatatgaccaagccaagctggctaatatttgcccgtaatattgatcccaccaacaataccacgacaaggcacaccatcagcgcactgggatgcttccaagactcttggcgtgactgtcccatcgcaccacccacgaatctaaagatctaggctgagaattcctccccaagcctcttggcatgggtccgaggtgacgggtgcagcaggatgagagggttggcaagcccttggcatcagtcggaagccatacgaaagcgtctctgatctgctacggaggtttctggtcgactttgttactttctttatcttctgtctcttgcaaacagcgtggttctcaccacatgaagttttaaagatctcaaccgcctgacaccttcctcgtctaatcggtaccatcatggtactcgcccagtatctgaagaaggtcgtggcctggattgctcctcctccacaaaaatccgaagatggacgtgatcaatggccctctcgggcggctttcctgttggccgccatgggaggctgcgccggtcagggaaatctgctgcgatacccgtcggtagtctacaataactatgggctgcaatggtttatcccctacctattagctgtgttcgccattgccattccggcccttattctcgagattgcgattggacaagcctatcgtggcgggacgatgatcgcgttcaataatatcaaccatcgactgaaaggcgttggcatgggcccgattttggtcagttttgtcgtcgtgcaatactttacggtcaatttggcgtggatcatgaactatttccgcaactccttccggagcccattgccatgggagggcagaatcgaggaattttatatgggcgatgtcgtcgccaatgtcgatccagccgtgggtaatctcactgctggcaatggtgccgttgcccactataccgtgtaccccggcattgccctcatcggtgagacggtcggctggagcgcatttatttggtttctcatatggatctccatcttccgtggagtgggcctgacgggtcgcgtggtctactggacgatgggtctgccgattgtcaccaccattattatcgtcggtcgctcgtgttcactggaaaatgcgggcgagggtatccgactcttatgggcgacatggagaagcgatcaactagcctcgggcactgtctggcaaaccgccgtcggacaggtcttcttttccaccggcattggtttcggctatttcacttcatatgcctcctataattccaaacactccaatgctgtcatggacgcatttctcatctgcggaagtaacatcctattcgaaaactttgctgcctttgccgtgtttggtgtcatcggctacctccgacgttggccacaagatggcgagagattgggtgcattcgttgtcggcttcctgaccctccccgaggctgttcttcacatgcctggtgcgaattggtgggctatccttctattctttaccctggtggttctcggttttagttcggcctttgtgatgctcgacgcggtggccacgttagccgtggattcgggcatgaaaatgtcgcggccaatgattgtgactagtctcacgataatctcattccttatgagtttgccatactgcacccaatttggattctacctgctggatggaatcgaccgatggattaacaatgtggcattgatctttgttgtctggtcggagcttgtcggtgcaaccacggtttatcgctggcacgacgtggtgagccagacagggctgcctgcttttgttgtgtataatttcggatactttggtggccagattgtcggagtcgccgtcgcacacggtatctcgaatccatcagctggtgctggcgccgggtttgggttgtatatcgtctgttcaattctttccgtcctcgtcgccacgaccccggctatcaaagccgccagtttctgggggcggaaccctcttctcgcccgattttggtatctagcattctactcggtatgtccccactgctaacaaatccagcaccaacggaaactaatatttgtagggtaatcaattgagacgcgacctgaacggtgtcgttggcggtaatggaaactggaacattcctcgtttctggcccattctactccggtacgtcagcgcgcctattctggccattgtgttcagcttcgcgtatcctgaattctataccttgcgatacgacccgatgatgatcgccgggtttattttggcgcacttctgtttgctcttaactctgctcggtgtggtatttccgcgatactacgatgtctttatcccaccgcaccggagggccgagggcaccgaaatcatgaccgccaatcagcctaaggaacacgactttgtgccagatgtcggggtgtttgactttgaatccggcatgccagagtcgatttcgggccggaagagttctgataagttagatagtgtacattcgactctgccgaagctataggctgtatatatcttgttcttgtcgttaaggtgaagatgagctggttatgatatgggtttttgctatttcaagtccttctccagcaaataccacgagcctcactagtacctagacggtcattagaaatgttagcctgcttgaaatcaaaaaaactcccaatgtcgaacattaaggtaccggaggccgtcaaaacaaaacaggcggggccgataagatccccaccccccgcgcttccacctgaaacgtcaagacatccaaagcatctctcttctccctttcgacacacactctctactttcgaaaatatggaccgatcaaacaaaccctcagcaattggagtgggagcttcccttccgcagcccaccttgtccatcaaggacaacatcattgaagcttcgctgcccactggtcagtcagtgacggtgcacctgtatggcgctactgtgacctcgtggaagacgggcggccaggagcagctgttcatcagtgagaaggctcatctggatggctccaagcctatccgaggtggcattccgctggtgttcccggtatgtgaacgctacaatttctcgatttgagctacagctaaccgccctgcttattctccaggtcttcggtcccccgccccagaaccacgctacctcatctctaccacaacatggcttcgctcgcaactctaactgggagttcttgggcaaatcctcttcggaagcgcccggaagggatagcgaccaaactgatctcactgtgaagttggatttcggcctgtcgcactcgatgctgaccgatgagttccgcgcggcatggccatatgagttcggtctagtgtacagtgttacactcaccacggactcactagagacggcactgcaggttcgcaacgagggccagcagaactttgagttccaggtgctgatgcacacgtatctgaacattgcggtatgataaatactccaggaccccctcgcccctctcattcccttgctaatggaattttacaaataggatatctccgacatccgtgtcaagggactcgaatccaagacctacatcgataagactctccaagcgacttctcacactgaatcgtcccccgcattggcaatcacccaagaaaccgatcgcatttaccaacaactggatccttccgctccaattgtggttgcatctgcgaaggatgaccaacctttgttctcgatcactcgggaagctttgactgatgttgtggtctggaacccatggattgagaaggccaaaggtatggccgatttcggcccagatgaggcttacaagaacatgatctgtgtggaggctggctcggtgtctggttggcagacacttgaagctggagaggcctgggaaggagggcaaagcattaagtcgcgactgtgaagatgagaggatattttgtctcccactattgatctctatgcatgatagttatgacctgaagacgcctattcccaatttcaaattgaagatccgctaatcgtgcggccatatttgatctctagcctcgccttgcttgactatagacagcacttttatacacaaatcccatccaaatttagttcaagatatagatacacatgctttgacgagattacatgtcatcaacacgcaacaacagtcccaattcgccccattttaattatttcagaatccatttctcgtccatcatggagcatttccatgctcaataccaacaggcgaaacacccacaagatcaataaaagatcggcggccctgcttgccctcttggaaagcagccaaccgctcagcagcctcaaagctatactgagggccattgtattggcgtctaccacggaacacccaccaggaggcagtgagggccatcaagccgacaacgatcacactggtatagttcatattttcaaccgtggccggcaacacgagggggaaacagaagaaaataacagtaaccaaaatatacatcaaagaaacaatgttaaccgccatcccaagtttctgtcccatataaaatggcccggggaccatatttccacgaccagacaaaacatgcggaaagatggccccaaagtaggacagcgagctcagcacaataaacgacgagatcagcgcttggaatgccgtcgtgctgccgatatatatacaccccagacaagtgacgagagcgctcatggcgactgtggcacgcacggggcagttcagtgtcgggtgcacttgggcgaaatagttcgaaaagggtgtcgcgttatcgcgtgcaagactccaccacatccgaccgcctgtcacgaatgtcccgatcagcgttgggaaggttgcgagaaacagtactgcaatcagaccgatggcacctgcgttagaccctgtcgcttgtcggtagatctcggcggttgggaaaaagccaatgttgcttgcaaagacagcgtctagatcttggatagagtaaaagagggcgatcaggtacacaaaggatgtgacgaaggctgtgagcatctgcaacattatgccttgaggaaccttgatctcgggtttggggactaaaacatgttagttggtgatttcctttccttttctcctgagtctgacgtaccctcttctgataaatggctaatgcagtctgggactccaaccgcaaatgcagcattcaacagaccagtcataaaacacaccccgtctgaccagccacccgtgttgttgtggtactcagtccacacttgggtattgctggcatgatctttcggcatcaccgtgagaaccacgatagttgtaacgaggccacacatcgacaagataagggaaaggcggttaatgacaggaatgaaacgatttcccaggcatacaatggcacagcacgcccaattgacaatctggaatacaataaatacttgccaggatttccacttcacattcgggtatttgagcagatacatggccacgccctcattccccaacatggaactcatcgatgatgctgacagcagccacgcgcaagcattcaggtacccagtaaagaaccccgctgtgcggccccgattccggctcaaaactgatgaccagtagtatactccaccggcagagggcatggaggaggcgagttcggccaaggaagctgagatggtcgtgtaaaaaatgctgactagaatcagtccgtatagaacagccattggaccgccattctggagcgcagcgacgattgtaccccctgttgaagcccaagaacttggtcctgttagtctgtcgaggttctatcagtgcaatttccggttctcaagggccttactttgcaatgacaatacccaagctggtcaaactccacatcccaaagttccgcggcagctcttgtttgtgtccaagtgcagattcaagccgtacttcatccattgcggcatggcctttcgggggcttttcagtgtccctagaggattgccatgagaacaccgccattttgtcgtaagtcgtgcgatgttagagcgaatatttaacaaagggattgaggcattgcagcaactaggtcgaggaaagggaaaaaggaggtgcatcaccccacttggtttgacagagcatacagggcgcacaggaacaatcaggtatgtcgcaacaggaaaccaagatgtgacgccaatgccctcatggctgccacatgtattacacgaggtccaagcttcaggcgagtagggttagtctctccgaaggaatgcatgtgttttctttgagaccctatatgaaatatggagctagagacgttattggcaatagtatcactatttttgttggaaaaggacccatactatacgtatctacggagtgcactacccaaatgtattacgatcttgcttttgattggacgagtacgaattgtttctcttgtgacctgcccgaatcggagctgagttgatacatcgcagactaagtaagggggattcgcggcgaatgcggagtttggggcgtcgatccgatgggcttggccacatacaatgtacggactactccgtagcttgaggcgaatttcatccagttggggtaaccctccaatattgtgtttcccaaattttagtaggtctgtcaaatatattctgcattccagcgttcttaggggtttgctgcgcgacattcaattagtctgcgccatgcacaagatcgcgatgtccgtgatagatcgaccacatggcctcgcatgattgatgatttgcattatgtataaatatatgaatacatagttatagagtgcagagctttctatgttgtatagggcttcgctgcttggatgaatagtacaaatcctcgtttcttcttttctaggagaatatatatattttcgactacgtgttgacttaagtcttctctatcggtatcatctgaatctaaaagagcctctaaatgacggaatcatccatttgagtagctcatttatagtgtccttgctaatacaataataaatcattatcccaccaactacggacagcccttttcagtagtttcacgcggatgatcaatactggacatgaccggcttcaacttcatcaacaatatacatactacggtgttgtagcaacgtaacagggctcgctggtagatcttttagcggttatgaatggtcttccggcgcgacctcttcattagcgacagacttcgcttcaatcggtgcttcgtttgccatgctagctagcggacatgaaaacataatgagtcaccaaattaagaagcgctcaattaccaaccgaaggatagaagttaaatagagctatggcattcaaaatcggccacatagtgacgcagtttttaaccgtggccctgaggttgtggacgttcttggccttggttaatgagatggccgtatcggaaaatccctggaaaccgagtaatcaaggacattccggtatagccaatgccataagagctagacatatagttatgtttgaaatatgcaaaatttctcacaccgacacgcttccaatcgaccgaactggactcactccgtacggagtatacttttgcactatgaatcactatttctgtaggatgggaacacagccgttctacggatcatattcaatcccttcctgctctaccagctctggactttcgttcatacggctagatttgccgagtttttcgagcagtagcaaccagtagcgcttgtatttattcgttattctagaacttccccgagtgctggaaaatactaaagataccgcagtccggaatacaaccgtacagagcatggtaagcatattcgtacttagaacaggacagatgtacaattgagcaaaggtgcaagttcccatgcactagttagcggcttttcagcttccaaaaccaaacctgcaaatcttaagatcatgaaaattgatcgggaaatagggttccatagggatgaaatgaaggaggttgaacattcatatcagacatgatcttcggtccacgactggcgtgccatgccagttcttattaaccctttctttagttcgcagatcgcgcaagtctattttatggagaatctttgtgtttaggaactattgaatctcgcttggatcgccatgcagatcagcgttccaaacttcccaataatatcagccgcaccgctcctacgtatccactattgggatatgatctgtcaacaagtttgtttatgtatgctcgaggcatggagatcacaaagctatcagcaacgcgcatagggggaactttacggcttgaaatattgaatggcgaccaaggatatgtcgttacaccaatctcgcttaacgcatcccattagagatattcgcgcacaactgcgtcgttctgcacaacactggacatttacagtgtcacgagctgaaccagcctcttcggtcggtggcaggaaggacccaggacacaaatgaggaatgtgaagcataaatcttcttctcccatatctattccatacttcgtgcctactttgtacattccaaagccgactgtcattggccagattggtgcttggagacaagtaaccccttgcgtttacgccccattcttccttgcttgtcagctagcactgacatctcatgggtcaggacgcatgacgccacagccctcggttggtagctttaattccatcttcgggacctaaggttagccactttcaccgactagatgaaatgatcgctctctcggcacagtagtttgctccgaatacataatttgacaatttacccaggctcccggtaaacaagtgatggcgccaattcaaacttgtcgctgatgcttctcatcagaacgcttcgataaattgccatttctcatatatggtagactcgttctatcgcgtcctgacaacttgagaactggttcagggagaaggtcgctctatccctcaagatgggtaacgagtcgcccactccaaaccagcttttcacagaagccatagtcttctggtctatagggcttgttatttatgtcgggagagtgtaggtttgagacgcaagtccggaattagagcaattgctaactgcagtgaagtgtggctcgcataattgccaatggatcatataaacggttgtttggtaagactgctaatatcggtttgtttcgaattctgctaataagtaactccagtggacgactatgtgatggcagcaacatttgtaagtgttatcatcgccgattatgatggtcacttctttcgacttacccgacggctcctcaaaaggcaatatataccacactgctagtactgattcaaatatcggcccgctacgcaacgaacctcatggaccctaaagactacgacatggtgctagcagacccaaagcaagtcagcgatcggatttatggaagcaagattgtcattgggctggagcaatgcatgttgatctcaacctggggcgtcaagacatgcatgttgatgctctattggcgaatcacgcagaatctgaaatcgaacctctatatcaagatccttgccgtctacgttgccgtcggatttgtcgtcataatggtcacatattatgcagtttactgccggccgttctcacaatactgggccatgccggtggataacatgcagtgtgcgacataccagtactactcgataacccaagccgtcttcaatatttcctctgatgccgtcatgttcgccattccgattcccctccttatcaaagctcaactcaaacggcgcagaaaggtcgtcctcatcggcgtcatgagtctgggcctgttcactatcattgctgccattctaaacaaatatttcaattttgcctctcctctcaccacaacgtaccaaatctggtacatccgtgaatctagcacggcaatatatgtcgctaacctcatgtgctggtggccactcctgcgcaagttgtttggtgtcaaggcattccagtacaacagcaaccgagcccagaaacatgggaagcccgacaaccagaacaatgatagtagcggctcctactccaacaactcacactctcatccttcatccaatttctctcgctcatggaagttaccttttcatcgaggaaataaaaacacaacgcccggcaagtacagcggtgccaagggcccgagtaccgaacccatcaacaggtccaatgccgagtttataaacgatatgcatcgtgtcgaagctgtccccctcgagaactggacgacaaagcatactcgaactgacacctcgataacccaagactcacgcaactcgctcgagaaacaatgtgatgttgaattgtaccagaagcagcatgcacgctcgctttgttaacatcataattttcctgcctgttcgaaattgttgttgattgtttgtacgttttagcgcaaggccttggtaatttatatttgagccgaacaactatttcctgctcatactctctacgaaagtaaaaatacatagaattcaccccggatcgacagctcaaccatggtttgcgctgatctttcagagagaattgggtgaagatgaattaagtgagtttcagtgggccgcgtttatggcctttgtaattgctcaataggatcagtagtctctttattagtctcttcagaagtcttctcggtagtctttcaagagtcttgtgtaggtagactgtagaagaaaggaggagagtactggatttctgtaaaggactatcgttgtaataaagctccgatggtctagtggttacgacgttgctttcccatgctcctaatgagcgatatctggaatcaagcaacagcccgggttcgaatcccggtcggtgcatttattttataaatttttttctaatattcaacccttgctagaacttgagttaggatgaaactttggaagacgagataaaataggattgaatttttgatagaatcatggaaggagggatactgttctaggcggtaggcaccccaaagagaatgtacaacatagtccaatttcttagatcaaaacccggggatggatggacaaaataattatgtcagcgtttatctgaacccggggcttatcggtgacgtcgtgttgtcaacagtgaacagctcaagtcgacatcaactctaactcgcaacgtccgttgaacaaagcaaatatgtctgatcaaattccctccgcaactgctgacccagaaaccgtcgaaactgcccttccttcaaacgccgaagatcgcaaggccgccgccgctctctcctccctcaacacaaatgagatcgcaacggagggtgcctccgccggagctccgcttagcgcaaaccaagaagctctgggaagggccatgagtcggctagaaatagctgctggacagggctcaggcaacaagaagacggctgagggaccgaagactgatggactgaaaaagaagacagttaaggttgctccagctgatgttacactgctagtatgtttaccatgtctatggcctcagtgctcgtctttgtgcagccttattgatgtatctaggctgagcagctcgatctaaataagaccaaagccacggagttgctcaaggctcatgatggggatgccaccgaggcaatgaaggcattcattgccccatctgttcaggcgtgttgattcaaattatttactgcttttgacacaatttaatgggttgagtcggaatgaatcaggtaggaacgaaacttcgtttcaacatatcaagagtcgctctttatgctaggggtctggttgtcacaaaggcatgtagacaatggttatcaacaggttgaagaaaatcactcctcgtcctcctctatctcatctttcttgtgttcgattcccttgccctcgtaaatactccacagcatagcccaaccaagcaaagactcaacagctagtgcccaccagacagctccaatcatgttattctcgaggcccaggcccagcccccaaccacccaggaaaggacccatggtccgacctgcactagcaatactctgtgccactccatggactgtgcctaggatagacggatccgtgacacagttgtttactaggatgatagcagcgggcaggataaatgtccgcgagatgacctgtaagctaatgacaaacgtgaaagagggccaaataatccatggtatgcgtggaagaaccacaaggaagggcatcagcacgtatgcaatgggcgaaaagggaaggaacgttcggaatgatgtcagtgtgcccagctttgtctgtatcatcgggtataggaagatctggagtggcaggccgatgaaaccaatgatagcagtagcaagcccaactcgggatgatggaagacctagtccaccgccgaaatggaaaagaccttgccgggagttctctggggcacggggtgcgggcaaaaatacaaatgtcatagagttgaaggcactggtgtggaaggcgagcaggaagtgagccactaaagtcagcacaatgttgcgtgtccagatctggcagaaccctattttcttatgcggccgtggatgcacgcgagagcgggctgggcttgatggcgtagaccaagcaccgaggctgccgtccgtgtaaacggagtcatcgtcgctggagcgtgtaagaggacgatagtgccggggtcgccgggcccaagctcttgtaagccgcttgcccattttacgaccccagtcttttctataacgtgcaatttcatgggtctggacggtttcattgttagcgactatatcagtacggatagggattgacctcacctcatcgagcccaagaaatactgcgagaaatgacgtgaatatgaagactgcgctcaaaagatttggcaatgcatagggccaatgctgcatccaccagacaccgtctttacctccgatggtagaacccgggccgaaaaattggggaaagctgttgataggatcggccaaagtgcctcccaagattggacctatgattacaccaatgttgaagcacatgggtaggagcaaaaacgcgcgggattgatatctaaacggttagctcaagataggatggcacattgtgtgaacatatcaacttacttcttctcggcgatgatctctgcaatcagcgtccgcatcactcccacattgctgttcaataccccacctagtgtccgaaagaccatggccgtcgcgaaagatcgagagaagccaaagcctatacaagacagacaggtgcccatcaatccgatcaacagcactctcttccgtcccatccattcagcatcggcaagacggccccaccagacagcggtgataaattgcgcagctgtaaagcaaccctggagcatacccgcctgggcggagatcttcgagtctggcaaagatggatcaaatgatttgagctgataaaacagatatgcctgcagagaggtctgcgttaacggctctgacagtcgcgccaaggtcaagattgccaactggccctttttcggtagcgagctccaagtcactggtttctcttcgtcttcctcgaccggcccgagcacgccgtcatgatcattatcttcatcaattgaggaaaatcgccgacgacttgttatcagcggcgcggactccaatctcctcggctgggggtttccgaaaattgcggtgtcatcgctctcaagatcggagtcgctttctgtatccgacaagtctacatgatgaccagtcaagtcgaaaccgtcctgggagacaggatggacatattctgggccctcgtggcggtcttggccatggttctggatttgcggagaagtccccatcaacggagatcccggttcgggaagctgtcacgcgagcgcgcctggggtagataccgatcgggtgtatgacacactgttgtgcagaattctaccttggcactttatctccgtacgtaaagcagtctgtaactcttgtagaaaagaaaagtcggggtgaaaaaggagctatgacacaatttcaccccacatttgcgtggggtcaatgcgatgaagaggttgccgagttaaccgcctggccaacaatggactcgagatatgagaccgtaaatactccgggcatgagtttcttaccgccagtctgtcaattcagattttgcatgtagtattcatagtttgtaacatgaatgagtgaactggggtattgaaccttcaagattggaactagcacgaactagtctagattcctcgagtagacaaattcgagcacgatttcaatcagcctatattcggtctatcacgcagccttgaataccacctattatttttccctaatttaggtagattactggcgggacccgaaccacccagatagtcgttgcgtctttcgtcctcgaccaactgtaaagcatgtaagcgtgacctttgagatggccactgactgatagaagatcaaactactagctgtcgcacctgcttggccgattttgttcgtatatatcagcgctgatggtgtgtctgatcaaggtcgccatagagggactcatggctatagatcgagagattcgcgcatctacctcgcgcaaggctttgatcagaaactccttgaaaacccgggaaacaagaataagaatagtatctatagtggcggggtggatagaagcaagccttgccgagatagaggaagtgagtggtgaattcatacgaaggaaataatacaccccaacttttgctagttagggtcagtagcaaatagacaaatgaaataaacaagggcctttgtgtgctttgatcactttgacttgagatctgattagtcgtggttcagacaatcaagcctttgtcgtgtccccgactttccaagtggctccatgaaaggcattcataacctacattgttaactctcgaaatcttcgatcaagtcggtttcgattgtactttcactccactcaccaccgcgtcgagttatcccctcggtgcagctctcatctaatcgtcaatcggctatggtcgcatccttacttcactgtctctttcgatttgttgtgttatttttagagtatcacttcactaacgactatatagcctagcacaggtctactaacagactttcacgatgtccccaaactcctctttctccggcgtgtccatctgggaacaggcctatcacgacgcatggcgacacttccaagcctccataatggaggtcgttgactggctaagctggcaagatccgtcttccgaagatcgccaaaccacaatcgagaagctaggccgacttccaattgaggtggacaatatccgaagcacgggacaggccatgtttgagcatgtcccaggctgccagacagtgcgaaacgagtctcttacgcacttcgtcgatgaattcatacgggactgtcatgggctccatttcaagctgaatatgctcgtgtggagacttatgaatcgcccgaatagtgacaggacagtttacaatcgtcttctcaggctacttgattacatcgaggatcgggttccagagtgacccatcaattgcggtttgtctgcttgcattactctatatcggtgttgattttgaagattttaacctgaattatcatgaacagtccgcaaagagaaatgccgtacgcttttatgatgttatttggtggacttgttgactggcctggttctatattcccgtggactgtatcactatctgtactgattggatatgctaacagttgagcttataaacagtccgaaaaccgaaaaccaaacaagcgatttaccatacctttttacgagtgaaaattaaaattggataaagacagcgagagacaccggcagtgttttcgattcttttctttttgtaacatatcaagtcagaggtcaatcttcttgttcgcgatagtgccttataataatcgattagcagcatgatcagttggtcagtctatatcatgtagtacttacgtgggctataatttatctacatttaagaagaccattgaaatgacaaaactgcatatgcggcctaatattcttgcttatatataatgaaaaggttattatatacacggattatgcacaagaagtcaaagtttattataaacagccaggcaggcaaatgaataattatgcaatgctctacagggcaagagccagagccaaaacaccagccataccagcaactcccatggcaatgcccccagtaggagcaggggcgccaccagtagactgcgaagaagagggagaagatgatgaagagctggagtcggagctggaggcggagctggggctggagatgatgctggagctcgagtcagagctggagtcagagctggagctcgagatggaggtggagcccgaggcagtggtggaagccgaagtggtcacggcggcattggaggtctggcgggaaggagtggtggagccagtctcgatggcgctgctatcagcagtctcggtctgagtaccggttgccgatgcagttgccgagacaccagcgagctggtcgtcaaagttggaagtggcccaggccttgacgctgctaggcaacgcgttgtaccaagctgggtaggtgccagcggcagcttcactgatgatcacgctgcgggaggcagggtcaatgatttcgtcgtaccatgaggccgggatggctgttgccagaacactcatgattgagctgggcacatccgagatatcgtaggtctcatcgctgtcggcagtctcagtgcctgaggatgtagcagtaggatccgcaggggcggccagggccgtggcggcgaggaaaagagtggtaaggaccttgtactgcattttcaaacgagtgtgggagtataggaacaatatttgttgaatagaagagaaagaaaaaacaagctgacggagggcttaataaatatcttcggagccaggcgaaaccagggccctcatctattagggccgcgctagtactcaactagccaaacctaaccaacgacgctaaccgaaaatggccacaaaaggcttagtcgcgagacttggccaatcacagtgcgcaggggccttgtggtcgcctgattagacccgatttcgacacgagagttgcctgcgttcttcttcgctattcgccaacgattgggctaatttcccatgtccgccagcatttgccctggattgccccttttattgtttccgtggtccgtcttttctgttccaaatttagcttcagggtcggctttcgctaaatctggggtagtgaaatttctatacaaaactctgtcgccccatatggcatatcactatatacataaccaagttcgagaagagcactcatccacttgatcaaagattccgtcaaactcattcaattctaagtaagtacagaacttcttaaataggacgtgacgccttccatacgattgttcatgctaaggttactacttgatagcttgaggaatgaatgtcactagcctgctacacagtgagagttcaatttgaattgtagttggtcaatagcattcccctgtttttgactgaagctgtactgaactccagtagcaacctctatatcgtcacacagaacgatgtgggatagttaaatactatgccttgaatatcaggcattaaggtgagtcatccgagtccgggaataagcgtatcacgtacacaccactgtttagctttcttttgttgctcgtccttgatatattttcgctcatcggtcctttattactatttctaagaagtttccaatactctactgcctattccaactccttacccattgcatttgcttgttactgctggtcaaaccgaagaaatttgacccccccacctttcgggattgccttcaccatggccgaatggagccctagttgtaagagcaaaaatctgtaactctgtttcacatttgatccaatatcactgactatatttagcctggacacaaaagcccatcaagcaagatgtcatctacgaggatgctcaagggttgcaagactcattgcagaaactacagaagcttcctccacttgtgaccacacaagaagtatgtctttccttcagactggatcttagctattatattgacctggtttgaagatcatcaatctcaagaagaacctacgaaatgtcgctttgggcaaagcattcgttctacagggtggtatgtcgcacaagaaaagcatatcccccaaacaagcactaagcattctgtctaggtgactgtgccgagctcttcgactattgcagccaagaaatgatcgaagccaaagtgaagctcttgttgcaaatgagtttggttctcatctggggtatgtcagacccccacaaaaagcaaagaaacatgacaactaatccaccaataggcgccaataagcccgtcatccgtattgcccggattgcaggccagtttgcaaagtatgtttttcattcattaattcatgaccacaaaattaataacaaaactaggccacgctcaagtccaacagaggtcatcaacggagtggaaatgccctctttccgcggcgacaatatcaatggcttcgcagcagaccctgtatcccgccaaccggatccatcgcgtctagtctcagcctacttccactccgcggcgactctgaattatctccgcgcctccctgtcctcaggcctggcagacctgcactccccactagactggggcctgggccatgtaatcacgccctcaatcaaagagcaatacgccaaaaccgtacgcgcagtaaaggatgccctgcgcttcatgcacacggtaggaattgataaagaccgcggcttcgagacagccgacattttcaccagccacgaaggcctctccctagaatacgagcagagtctaacccggctcctccgccacccagcgcgcccaggaagcaccaccacggctcccgaaaccggctattacgcaacatccggccacttcctctggatcggcgaccggacccgccaactcggcggtgcgcatatcgagttcttccgtggtatcgctaaccccgtcggaatcaagatcgggcccagcatggcggcagatgagctggtgcagctgctggatgtcgtgaacccggatcgcgaagtcgggaaggtgactctgatctcgcgatacggcgctgggaaaatcgccactttcctccctggtcatattgccgctgtgcaggcctccggtcatatccctgtctggcagtgtgaccctatgcatggcaatacgcagagcacaccgtctggtgtgaagacccgccacttcacggatatcttgtctgagttgaagcaggcgttggaaatccaccgcgctgcagggtcgttccttggtggtatgcatctagaacttaccggagaggctgttaccgagtgtgtgggtggtgctggtgggctgacggaggatggacttggcgagcggtatacgacattctgtgatccacgcttgaacgagaagcaagctttggagctggctttcttggttgctggattctatcgtgaagagtctgaggagtaatatcatctatttggattgacacgagatatctgaatgttgaagcgggacagcgaaaatatttcgggcattatcatcgagtttctgaatcaaaagtcatgtatgttttgcaagttggcctcttttcggatatgagtaaaaagtctggatgtaaatcatctgggattgaattgatttaactgagattcgaagaaagtagcaacaattgtccttgcacaaaacagtccaacctatccggctcgccgcccatggggcaaaatgcaagaaacgcccaaacaaagagtccccgtatttacagtgactgggtatggatctaataaagcgaataatgtaatgaataaaatcaaggaacgagaggactaccgacggcaggcttgtaaacaaggctcttgcgcctggcagcctctatgcggaagcggcgctgtctcctagattcctcatcttgtccatcatcgagcaaggtactcgcaggcttagcactcgggaatagtcctcgattgctctgctttggcgggcaagattgctggataagcttggagcggttcccaaggaatcctggtgtagcgggcgacatgccaatggcatcaaggttggcaaagttgtatcccggagtagcagggaattggtatttatcagaagaagattgtcgttggggtgtggacggcatctcctgttggtgggtcggaggtgtgatcttgcggaaaccctcaacggcaccgggattgacaccactgcgacgtccgccggcagatggcgcgggagattcagagatgcgcacgagtgttccgttcacattgcttagtgcacgaggctccatactcttgcggcgcttagcgcctccgcgcgggatgatagagctgtcaaccgcgtacggagtttcatcaagccattggttttcccgttcacagctagaaataacaattagaaaagccatgtaaagaaagtgtacaaaagataaacttactcgaggacccagccgactccaacacacttgacaagacccgctgccttcttgactttctcgagagttcgcaggccaccatccttgtatacaacatgcgtgatgccaactctcaagtccttgggctctacaccatcacttggcgagagactggaacgagggttccaagaccaggacttcacacaccgagcacccatttgctgcaaaagttccacaaaaataccagaggcatcctcaccctcggtggtatgaacatccacatgcacgactgctccatgcagagccatctgctcggtgctcatactacgacgtggcttcttggcaggactggcggttgcgacaggattactgagcggagccatcactggtgcttttacactgctgcgtctatttgtgacagaacggcgctttggtgtcggacttctgctcacccgtggaggtttccgagaaggagacagaataggtacactatcgttgagtgccatgaagattggcttgcgaacacgcggagaagaccgagtgggagatgggctcgcgggggacagacctctcttgcggcgcagcttgagaggggatatgtcaccttcagccttcaaaggcacttttgagacagtatgaatggtgcgtaattcgtcgggctggacgtgagccttcattggggttgaaggaagaatcagaggaccacagttctctttgtcatcgagtagatggaagtcttgatcctgatcttgcgggacttgagtgacgcaagtatgctccagttcaatatttcccgagtcaggatcctcgaatatatccgtgcgtgtgcttggagaatctcttatttgatggtcttcataaatggaagatggccgtggagtctgttcataatcggggcttatacaagtagtaccgctttgaggttgagatggtaattcggcaaacaaagagggcgggttttccaaagggctctttgacaaatcaggatacggaacagtaccagaattcgccggagtttccttgttggtgcgatccaaggggcctactaatgaaaagactccacggcgacgcggtcggagtgatctagcttgggaaggcgtattttgttcccagcgaccaaatttttgtgccagtggtgtaaagcctatgctagcctcagcaggggattgatgctgacctgcaacgcttggtgtgttgaagagactgggtgccattaaagcaggactgtcaacctgggtgtttggtttccagctattttcttcatgcaggggcgtgtcaattatgacgttattggcattcttggcatcgagggtggagccatggtcattctctgagttgtctgggcgatttacggacaatggagtagattcgccgaccgcgaaacttggttttgacaaaggagtcgcttgcgtcctttcaagtggggttgtaataccctcaacatggctgctctcatatggtgaggcaggctttgacgatattgtagaaaacgcaggcgcggctaggatagactcagtatcttccacttcgctttcctcgctcgtcacttgttcctcgtcctcgggttggtgagtggcctcttcttgccactcacgctcactctctaagggatgatctaagtcaactgtccgctggacttcatcgccactggtcaaatgcaatggtgattttgagggcgaagcgagttcattcggcccctcttccattagctcttgcatctccgtagttcgcaaaggttctggagtcgattcttggcaccggaatcctgtatcaaaagttcggagttcttcctcctcaatctccttctccaatactgccagctcctcagaataactcgtgtcctccatgactgagtcaacctgatcttcttcgtggtataggtcattctccgcgcggtgggcttcttccatggcgtcaaagcaaattgtgtcaagctcctcgtattcaaattcgctctcgtcagggacatcttcaccctcctctaggtctgaggcttcctggagttgttggtcatggatatcacgcgctgccagttgggcctcttccatggcgtcaaagcagattgtatcggcttcttcgcggtcgaattgggcctggtcttcaggttgttcactagctccgggccctgcgtcttcctgaggctctggatcatagtggtcctcggttggcatgttggcctcttccatggcgtcaaagcaaactgtgtcaagctcctcatattcaaaatcgttctcatcttggagctcttcatcttcttcggaatccgaggcttcctgaacttgttggtcatggatatcatgcgctgccaattgggcctcttccatgtcgtcaaagcagattgtatcggcttcctcgcggtcaaactgagtgtggtcttgaagttgttcgctaacggaacctgaatcttcctgctgattttgatcatagtggtcctcagttggcatattggcctcttctatcgcgtcgaagcaaattgtttcaggctcttcatcctccggctgagccttatcttgaagatattcactttcgtcttcttccagttctgactctccctcggcctccgcctccaccgccgcagggagagggtcggtgtttccatcattggatgagtctggagctacttccgaggcagcaatatctttctggatgggagaaattgatgatccctttccatcagaagatagctcaattccaaagatgtctcgagccacatcttcgaccatttcagtgtccttttcaaaggctgcctcgtctggctggcttgtccgtggcgaggatttgggggtggtgaattgtgggcgttcaaccgtcttaaggggggttccgtcattgtccaccacggatgtatgagtggaaaatatcgagtttttgaatggcgaaggtattctttttgcggggctctgaaacaagggagttcgagcaagggctactggtgtggaagccttgaaagccgattgcgagaaattagcacccaaacccttcttaggtgacatcttcagtggagaaacacgtccgggtgtaaagtcgggtgcggcaattggattcacactgtcccggaagagggaacctccacgattcggggtgtctttcatggagaattggaagggagatgatggcgctggtcgtcttgcggggctagacatgatcatagaatcgctgaaaacaaccgaatttccagatggaagagcgaggtgaccattatctgcgactgcgttctggctgcggttcggtgcaaagttgattttcctgactggggagctaagaccgatgccgtctgatccgtgttttggggttggtagtttcggttcgccattctcgtccatgaagctggacgccttcttgggtgtaaaattgatcctccgtacaggagagctcagtccagtagtctctaaaccacgcttaacaggcgagtgaacaacaagtctgaccaagcccttggtatcgtccttaatggtgttcaattcatcttcttctccgtcggagcttgcataggctgatagagacttggctacctgcttggcctttttgggagataatggttgggccgtatccttcttcgctgcagctggtttccttccgcgagtgccggttgccacaggcttgctaacaggggtggctccaaggccggtcttgccaacgcccgcactcttggtagctacccgtcgacggccgacagcagaaacctcgggcgcagattcctctgcttcggagcccgagacatcctggaatttcactgtcttcttcttggcgggcccacgtagaagatttgagcgtatagttgtcgagttagttgcaatcctaatttggttcgatttcgtctcattcgctgtatcgactgccgcacgtgtccgtctgctcgtggccgtagtttcactggcctgagaggtcttcactattgttcccgctcttggtcgtccccttgttttcggcgctgcctcagccttagtcgtagcagcttcttcgggcaacggattctttctcggtcttcccacacgcttttttggtgcctcggtttctcctatctcatctttgcgggtgttgttctggggttttgactggtcggtgagtgactccgaggaagccttccttcctcgcgcagtcacagttccagtcgcttttggtttggtagctggtcggccaggaggacgtccactaggtcttgcgggtttacttgtgataagccccagctcgtcatcggactcatcatcggtcgggggcgcagcccgtggtgctggaattgctcttcggggagctttcttctttgcatcggcagcagctgtcgatttggttgaagttcgtaccgcccgttttgcaggggatcgtgggattattgcagcgcgcgccatattgatcacgcgttgtcgttggtggtcgcagttagtattggcacgcgacactcatggcgggtttgggcggtcaaatatgatatcggcccgatgtcgcaaggtcgcagattaccgggagttgtcgaattaggtgcatgagaaagcaaggcaaagcaaataacccactgtggaggtggcggctgatcgtgggttgcttgttgtggcgtttcccatagcaacattggcacgtgatatgatctgcaaagaaaacatgcttgtcgacaaggatcttacattttgattcaaggacagattgaattatgaataaaaattatcaaaaagtagcagggtaaaagttgctctgatcatcatctaaaataatcaagaagttcaatccgccataaattgtatgccatcagatatatatttctactagatacctgtataattagtgtagttcagaaaggatctcctactactcctctcaatgtgcgtttattggccttatgctggtctaaagcaccgtgttgcacctgatagcagagctataaccatgtgcaaatgtgtacaagactccattgattaatgatctgaactaggtagggactatcagtaagcccaagttcgaatcaaagagtaaggctaggtttatttgcgaacggagagaagaaataaatgctaaacggaagtgtaaacatgttgattatatgggaatatatgcattgctatcgaattggatccgaagagattcgaagatgtctaggcaaataccaggcagatggaaatgacacgaagaacggctcgatggcacatccaccatgcttggaaaaaagaagtgtgtcaaatggcgaaaatccatgtcgaagctattcgcattcgaaacatgcagtgggaagaagaagaaaaaaaaaaaagttctgttacacaagagtaagcattgccagggcggatacgacaaccgcagacagcatggtaggcaaattcatcgtacccatgctagaagcagttaggtaataagttggatcataattgttcggtgtggtggagttcacagtaccgttccagcagtaccggtcgaaacactggttgcagatatcagggagagtggtacccgtgcgctcgaacgagcggctgaggatagcacagccaacacaagatgtccagtttccgtcgagggtgctgttggccatagtggcaacctcgtagccattgaggatgatattgtcacgctcagtgttgtcggtgcttagttggaaggttgagatgttggactggtaggagtaaggggcattggggatgtacacgacaagaggcgagggtccggtctggttggaactattacagccaaagaaggacgggcgggtgctgaggcccaggttgacgaaggtgttctggtctggaacagcagggaaggcggtgccgttgccgataccgctgctgttcaggctgcgctcgtaggttgcaaccaaggaagtgccgtttggccagtagtagtcagtgtcggctgaagagtcaacggcaaagatgacatcaacatggcgctcgggctggataagaggatgcaaagggacgttctgtccatcttcgccgccatcgacgacatccagaattttttgcgcggcgtacggcgacgagtccgggttgtatttatagaaggggttgggatcgtatgaagcgatatcattttgcgctttgtctaccccgtacaagactgaggtgaaaacgtccttcactaggctggggagcgaagtggtgttgatctggagaaggaactggttaaagagtgtggaggagcttccaatcacaaaaccagcactgtcgaagccacggatgcagctctcgttgctcggaagcgagccaccctcaaacttagagcctaggtactcgaggggaatgaaaccaaagattgtagggtcaaaagtgccaaattcccacgggttgaactcatagacggtcgagttactgccaacgagcagttcaccgggattacggccatccgcaacaacgaacggcatggggtagtctccgtccttgaactcggaggtgtcggcaatggaagaccaggtatagctgagtccaccattgctagcattgaacatttgataggagagtgcgcggcccctgtaaccaatttagcaaatacgcacatgcatcccgataaataggaataacataccagatatcggtgatagaagtatcgaatccagccttcttcttcccctcgacagcctcgcccagttccttgtagtaactggcagaatccaaaagctggataccaccagtatcaggaccttcgaggatcgagtttccaaactgccagatggaaccatcctcgtgcgtctgcagcttgtcgatcgtagtgaagttattgatatagatcgaacccaacaaccagctgcctccactcagaccagcgatataggtagcagactgcagcagaccacctaaatgcccagtagtcgtcgcattggacgtccggctgtcaaaagccttgatcgcaccggcaccgttcatcaacgcacgccaaccgccgcctgaaacagcgatgccgatattaggcagatttgacgagttgctagagtgtttgtcgaggtaggcaccgacatcataatcgccgactttcacatggtcgaagaaatctttcatcgctgacagagacttactgcggcggaccttgagccatgatgtctcattggaggacaagtccgctgcgctgcgaactgtcggtcggctcgccgggcagctgacagacgtcggcacatacccgtcgggcgcattgggaagagctcgttgcacacctgcgaatgtgctatcatcattgaacccgccgggaacagcaattgcacctgcgaggacatggtgattagagtggagaaattatttggtagacgcgtgtacatgtaagtaagccaagaatggcgggaaaaaaaacctgcgaggggcagcacttactggacaagcccagagcaattgagattagagcaaaagtcttcatggcggttagatcacaattgtgatcaactgtaactgcgcaagaatcgtagagaaggatgaattcccatgtactaaggggggatacttatgcagcgagggtgaatacttatgcgccgggcctgccggaagcttagccaagccccccgatgtcccaggcagttcacttggatgtactccatatgttcatagggatcacgaatcatcgctgccgagtggagtagagtgatgtcaaatattccgaaaactccgtctttcttcacagactattgaatataggatgaaaaatcagtttgctttcgaggcgcaggtcagatcacagccgccatagaggtaaggctgcccaaatggcgctgggaaggggctgatgccgagagtgtcatgtgataatatcgatgtggccaagtaggcatctgcatttccgcagctttcattggagtaagtttcatgaatggctctagggctaagaatgcctaaaaatggacgcctctcaaatcactccacagttaaaaaggatctggcggaagtccaaggtggatcaaatcgagaggccgtaattggatcgcgtgtattgccttttaaggactgtaatcggatcgtctctactgcctcataggtacagatccaaggttatatactctaggctgttatggcgtggaactgaggctatggatgtcacgaatcgagatcggcactatttgaaaaggagctcagtttgaccttactaccaaatgacattacagagaagcagtcattagaatgaactcaaatttgaaaaaaagctaactaccagctgaatcgattgagatgtgacagaagcgtcacttcactttggaagttcatcatctcaatcgaaccaggcaaacgcaaagtcagcattcacccacgactagggccaaccccaacatggtctcccgggctctcactagcctgcacatgaccctcgggcaagttgttcaactcgtcctcctctttatccaggccccagaactggacgatgaagacggcgccaccgacaaaggtcaagatggcgaagatgccgtagttccaggccaacaaaggggccctggaaagcggtatcaaagtctcagctatggctgcggagacagcgttagtgaacatattcatagcttggacgagggaacgcatattgcgaggtgccttggagtaggcatactccattgaggtgatgacggcaaagatctccgatacagcaaccaggacgtaggatccagtctgagcccaaacaaggatatgacatgggtggacgctgccatcgtcgttggggcaggtgttagctccgaagccacagggcgaagtcaggtagatgtaggactgaacgatagcagcccatatcatggagagcgacgccaaccagaaaccgagggcaatcttcttaatggccgtgaattgaaggcccattttgcgcaagacggggtaaaggagcttgtcgcagatcgggacgaagataatcagcgccaaggggtcaaggttgttcacaatatcgttcgggacgcctttcacggtcatcgtgctagcctgtgcgttgagattgttcgtcagttggttgtaggctagccagtagaatgggaaatagcaaaaaactgcgcaagctgcaaatccacggtgcacttcatccacccatgcatcgtcaaaggtcatccacctgggtcgggattggggttcgatgttggagggcttcgcggtgtcccagaaagtgccatcgtgtgttcgtttccacatgatgtatggattaaagtgccagcggtcgcgcatacaaaataagattgtcatgatggccttgtaagttaccgagcccgccgggggagactggcgatagcgcttgcgaccccaccacatgatgggtggagtagtcaggaacatgagcgtgggaagcagaaaggccaaccagaagccgatatacttctccgcatagaccatgccgatctgaccgaccagtgcgcctatgttgataagcaggtagaagtagtgatagatacggctctgagtgatagtcgggtcgacgacaacacgctcaccagacttcagtgtacgcaccttgagattgacggcaggtatctgctcgacaaccagagcggatatgttgggcttgaagccaccagtacctaagcccatgattattacacctagaatgaacacagcgaaggaggcatcagtattcataatcaccggtggaatggcagagatcaccaaaatgatgtgacctaaaatggcagccacaatagaccaggagatggtcttgtatcgtccccagtactcgtcggcgatccaggcacccactagaggaaggcagtagcaccagagggtgttgaaggtgttgatagcgttggcagtctcaacacccttacccaaagcaccggagaaatcctgagagctagggccaccagccccggttgcgtggtttgatccgggagggccattcggggcaggaagggggagagcatggttcacgaagttagagtctgtgtttcaatgttagaagagtatatttatagggatgtggctatcttacagagaacatgggttccgtggtaggaaaaacgctcgcacagctcaacaaatgcgatggtgtagacagcccagggaatcggagctgagacgcgacgcaaggcattggggccatgaagttcatctctggttggatcctcgtcacccacgtcaaggttgtacgactcggggatgatactcttatcagcgacctcattgcaaactgggttactttgcagggtggtattggcaggctcaacatcacggataacgagcgagctcgagtcccggcctgtggcctgagctgccatcttggatagaataaagattcgaggctagtgcaaggtatgcaggatgaacaataggagagatgggaggatgtgagtggatgagaggaggaagaaaaaggaggggaatgaaaagagagaagaagtaaacaaagtaaacaggcgaggtgaaattcacgtgttgggactgaagtcgattctctcgcgtaggttacccgtagtaaagccataacttcaacagcagtcatgtcctttcttaccctgccaagacaggacctaggctggggctatacgactcaacatcaagtgaatcaatataccaaagcagcaattgaagactgatagatgtagcatgcatatgccaaactatgtaacctgtgctatgatgttagagttttcgttccttctctatagctatagtgagaaacataacatatatgatatagacgatattacctcgtgaggttacaatggcgcaaacattctattcaacaaaggattcttttgaggtcaaattaaccccgatatagtcacaaagtatcatgatcaagttctttgcaggtagaggagcctgcagatagcaacaggattaataaggtattttatatttcagcaaagaaactacgaagaacagaccttgaatgctaatccaagatgtgccattggcttacgtcacagagtgtcctcatcctcatattctcaggcctgccttgacctacagtgtgtagtcttgtgtagtcttgtgtagtcttgatgcgggttgaatagtataagtctacatattattcatccataaagccatgtcttccgctacccgagtacttggccaagcaagcaatctagtttgagactgcttacctatctgggctgggatgtcatcattagacaaacccaaagcataaacttccagcaacctatccgcattctgccatgcccctagaagactatcccaagtgattgcttgttgtaagtacataataggctaagggtaattaaggtattccaccagtaagccaacacacagtcaagcacccggctcgacgtctgattggacccagttctccgcatcttccccaggttcggtgtcagtcccgaactggttcttggcggctaaaaagaaaagacatcagaatgacgattacgaggccacgtacctatcacgcgataatttgtgtctgcaggttaccagatttagcaaagtcattcttttataacatatgtatccccaacatttgatctcttttagattaacccttaagttcgttgagcagcgttgttgggaggtctggtgatctctggtggtctaggtatgtggtacattccgactggatggctggacgcggttatttgtgggaaagtatcagggttcgagttcttagtggcggtcgtacgtaaatacaaggctacgcatgacagtgaatatatgtcattgcacaaccatgagattcgattattgatctaactcgagtaggtaaagattgacatgcagctaaaccttagaacgaggatgaactgttcaaacaattataactgttattatttgggcgatcgacttgtgtctaaagtcatcataggattcaaatctccaaagcggattaaggctatccaagaaaaggcaatgatcaaagccaaattaccaaaaatgaaagcccatgcgcgctatttccgccaatgacccgaaagaaaaagacgcaggacgccatgcaatgagacaaaaagaaaatagtcacgcgcagtgattgaaaaggcaaaattgaatctcggccataaaatctaccatgcggcgtggccaccatccattcgcaggtcacttccagtcatgaagctgctagcatcgctaatcaagaagacagcggcaccacggtactcttccggtcgggaaagacgggcaagcatgttctccttgggccactggtcgcgacgttcgggaaactcgagaaagagcttctcaaccatggcggtgacaatgtagccaggggagatggtattcacgcggatgttgtaggtgccccattcagaagcgaggttgcgggcgagttggaggacagctgctttgctagcgttatatgcggggcaaataagaccctgtagggagaatatgttagatcatcgaggccagccagaagagcggaacgtgacatgaagcggggaaatgttccatagagagaaagaaaggaggggagtgggaacgtacgcgattggcaatagtgccgctcatagaggcgatcatagcgatactacctccgtttccaaagcgaatcatttgcttagccacagcctgggcggtcatgaacacccccgtgacattgacctcgaacatggtgttgctgtccttggctgagtattcgagcgctggggtctcctgctgaatgcccgctgctgcaatgagaccatccatgcggccctcttcattggcgatggtctcgatgacactgttgagaagttctgtgtcacgcacgtcgatacgacggtagtgcaactcggtgccaagctccattgcgcgctgttggatctgctcaaactcgggggcctggtgattgagtggttgttagtttagtgctgccatagaagcgagggatgtagatacttaccggctcttccagacggtcgagtgcgtataccttcgctccggcctccaggagtgcctctgtctgggtcaatcctagaccacgggcagcacctgagaccaacaccaccttcccagcgagactgaactcgggcattctggacttctggcccagcaggacgggctgggcggtaatgggtgcagtgggaactgtagtggtttcgatggagacagacattgcgatgcgatattaggtgagggtagttggaaagtatattaatgaaggcgtcaaagattattagactgattgtttcgcgtgcagatgaagaataatgaggatgttccagtggacagaatcaactccctttaaatacatatctttttgaccggaaaggccagaaaaaaccggactaaagcgactccaggtgtctcgtgaacagaaagaaactaaaggatatcccaaaaaggaaatccagatttggaccaagggtactgcagagcggattgagtccagacttcctggaatgcaggctaaacggctgtggggaggcatgcacagcctacaaataggattaagacatataataattatctacaacatatggagtacatagtacttggatactgcgtcaattgatgtctcaagcaaataaatttgactctcttgtgttctgcgtcatacttacgttccaattttatcgaggggataactacgtgtaattcaggaatagctcatctcacaggccggaaaaccagtcaccaggcatgctaaaactcacgatagttggtttctcgacgatagtgtggcagttcggaaccttaggccggatttctcgtttaggaaacccgtctggggaacccggggatccccaacgccactctgatcttcgactctcaacattctttttcttgatgtttttgcaaaagaaatcaatccagatgacctcccccttgacagagctacacgtacgtacatcatagacaaattgccgagcctcgagccgggtcttctagaaatcatccactccaagtatgtactatccggagtcaggtggctctttgcagatcgacgagagcccctgccaatcaaattagtacatatggcctgtgatatcggttcctgtccgatcgccccggctccaaggtgacggcccggacgaaaagaaattcattggtcaattcctatattaacgtccaaatatcttttttctaaaatgtagaattcgaaatatcagatctcggatttagactaggatgccttagtcatcagtgaaagtcgatgtccaagtcgaatagctatttccggatttcgaggaagtacagatctacaacaaaattcggactcgaacatcgaaatccgagtccagactttgtgctgctactcagaccatagcttatcttgccataaaccctgcactaatatccattatcaatcagccaaggacagcacacaccttgtgaccatcagaatcttcattcccagctccttactcaatggggagattccgaggtttccactttttcttctgctctcgtgatgtctatataccagctagatttagcctctaccatatcggtgtgcactctgcatacttccaaggttcggccgcgtgtccgattatggcttgtttgtacggatccaggggccgtttgtttgtcggaatctggtctgggtcttcttcccccctgtcgtgcacttcccgggcccgccccgagtggctcggaggtctcgcatcccacatgaagtgtgcgtggggtatgatatgcacgggtcaatgctgtcggtgaaaaagtggttagctgagaagggaaaaatatctcatcagttcggggttcctccgttgccgccggaccctatctttttgtcttgcgcgactttgaataatgagccttgacatggccaaggtattttgtacctacctacttcctatgaacgtagtattataaaatgatctgtgtagcattgtgttgcacttactgcattcctcttttcccctcttcgttcatttttatattcttactctagacggccgtctttcaaaatcggtgtaacaggatttcttacgaaaaagttgctaccgcaggacttgttgagcccagctgatcaggtacatacacatgaaagaatgggatttaggtactgagatgtatggtgcgcagttagattaacaacatttggaccttggaaacacggaatcgagaataaagcttagccttagcattccaggatcaatgaagtcaaataccgccaaggctcctccggacaatgccatgcgaacattgcaaccgagggaaacccagtggatcaagcggggcctgtcgatccgtaggttaagttcaggttaaggataagcatctgcatcccgtgcaagggtagatcgcgatgatcataatcaagtggggaaagcaatttaggacatcagatctagtcgtaccaataaccggtctagtcttatattcccaaggctacagcaccgttccaaggaagctaaaatgaagtcgaatggattggattatacatattaggggaaatacctggtcaatcttaacaaaatgcagatgtcaccccaaaataccgaaggatccctcggtgctatgtgcatttttttgttctctttcggcttccgtacaagtacaacccaggtttgagtaacatcaagggatacaaaagaagatgaaaaacatgaaagtgtaatcccatcctatgcagattcacatgagaagaatgaaataaagggctgtctagccatagtaggagaaatatcttcaagaaaatgagggagctcaagcatacacgcattcatacgtgagaaaacaactccatgtgaacgccggttccaagacaaatatgggagatatcatgagatgcaaaagggacgcagaaccagaagaaaaagggaagaaatgcaatgcgaatggaccataacaatcaacaaaatccggttgatttttgctttttgatttgcttttggtgttttcgcggagctaggcttcacggtaaccccaaatacgtttttgttcactcacccaccacttgccaacctgctcagcatcattgagccaatcagcggactcttggccaaacttaggcttaacctctttgatgagggccgcgagagtccacgccttggaggggtggttttcaccggggtcttcgctgaggtgagtgaatgtgtactcgaagccatccttcaagggcaggattagacggtagggaacgtcggctgccatgatggacagcatagagccaccagcgttgatcaggcccatgttccaaacggagcgcttgggtgggctctctgggtgggagcgggcttcgacctgggtgtctactcgctcgtgctctgggtgctcatgtggtggaggatggtgatggtcacggcggttgggtggttcctccatggaagagaggaaaggacggatgagggactggccttgatactctgggaggagggcagaggcgatgccggagtcgcgctcgtctagggaattagactggacgagaagatccaggatggtagggacaatggaaagggcggttacgttggcagtgatgtccactcgaggcatgtgcgggtggtggaaaaccaagggtacgcggaagttgctaatgtggccattctcatacgtgccggtcatgtccttattatcttcgccgaaggcttggccatggtctccgacgacgacgactaaagtctcgttggcaatgccagtctggtcaagcatagtcattatatcgccgagccataagtcgacgaaccgggcggaattcaggtagttgttcatcaggtcatggttgatgcttccctggtcgctcatgtatggttctttctcgaagtcgtctggcgtactccaggggtggtgggttgtgctggtgacatgtgaaaggaacatgcgggtcttgttgtttgcggcctcctcgaagaggtctaacacgtagggtcggagctcagtctccgcaaatccgaagtagttaatctcttcgccctgagctttgtgtttcgagtgaggggaaagcagattgctcttaacgaccttgtgcttgaagcccatgttgttgttcaggatgtcctgacggtcatagtcatcggtgattgactgcatgaatacagacttccaagggtttttgagagccgcggatttggtttcagaagaagagttttgcaagcgcttctcgggttgcgacttgccctggttgaacagatcgaaaatctgtggcaagcatggctgataaatttcgagcagagactcctctagaaggtccactggcaaagggttcacaccacaatggcttcccaaaacactcttgaaggtcaaggagctacccgtcacggcgccacgcacattaagtccacccataccttcttgtggcggggtcttccatggagaatggctcatgtcgaccttgtttcccttgctatcggttgcgtactcgccagtcaactgttgagcgaccaaggtcatgttgactagacgatcgattgcctcgttgactttctgcttcttatgagacgcaagaagaccatcgaacaagggtgtgccctgttgtgtggggaaaagttccttgcggccactttcgagcgttaacagcactatatggttgacctcaactgagtgctctttgaaggccttctgcagcggctcataaatttcaccgcccagatttgtgaccatcagcgggtcagtcttggggtcgtagaatgcactctcatcaccggtgcaaacaaaagaataatgattgtccttcactgcacgctcgctcgggctaagatcccagcggctgaatccttggggtgggttctcggggagccatggggctcgtgaccattgttccacaaaggtcgagtccggttggaactgaggacgagagaccccattatcagccgtgagagggaatggcatggcaggctcgcgacatccctccaccgttgccgtcttcttctggaaagcatcgagcagtgtcaggggcagagctccggatagatggtcatacggtatagcgggccgagttagttccaagaaaataagcgatacacagattgcgactgcgggaataatgcgacggaatgaccggaggtctatcgaggtcatgcaggatttgctaggggcggaaatcaatgtataacgcgctttgaatcctcgtatggacaggtctcggattgcctgcaagccaagaccggtgatgttgtacaaatgcgaatgaagcaaccacgcaatgagtccgaggacggtggccgcagcggatacagtcgagataccgctgaggagaattttcatggccgccggatcgctcaggaagctaccaccagctgcccaggcgacctcggcaccggtctgcataaagaatccgaactggatggaggaagcaccccatgtgatcaagctattattcgtgttagcttgtattgcgcaaattcccccctgtcctccatttcggtattcggtattcggggtaaacatacgatagtgcccctcccaacccagtcgagagccattgccatcgaccatctggcgcatggaagcgtaacaagacccgcacgaatataataacaaacacatctggtagaatgagtgtgggcgaatagaggacgaagtagaggaacggtaaggagcgaatatgtagcgcaatatgtaaagccttggaggcgagaccgctcacaacgagtgtggagaaaaggaagggcgacaacggtggtaagagggcgaagatggacatgttggaatcatttcatttgtacagtggaatcgcgcagttggcaacgtagggggagaagaagagtcgaagaatgtcgaaacggcaaacgagagactaggcagcaagaaagagagaacagaggagtggtcccgggaggaaagggaagggaaagggtccaagggttattcttagatatcacgaaataacagaataaggccaattaggcgatgggaaattgtgcacgcgactagactaagcggctccaaatttactccaaatgcttggtttcgcttctttttatttttattctgtgtttttttttcattacgtcgccgaaaccactcttcccatccggtcaacctctcatattgtccctaagttgcccaagtggagaccggagaggctgtacagattattatgtcccagtctgtccaagtttatgcagccactaggtggaccctgcatcgcactattcctaaatgattcgctttcgtgagaccgaaaataaatgatacagtacagtacagtaagataccaatttcatcgaaccatggaccaccacagcccgaggtcatgccaatcttggcaggttccaaggttcggacgttacttcccaaggttctgcgaaaagggggaacattcaaggctgtctgcctgggcacttgtgcataaaatccggggaaaaactcaagatttgcgccgatttccggtttccccccacctactgtatgtacattgcccccttttagattattattattaatgatcatcccgtgtctctgagattcaattgtggatagtccgcggatagaacaatcgaactttgtctcggaatacatctaccctgtacattgatgtgtatttatatgtacggagatgtgcacgtatttggccatgatccaggggtatggtcggagactgtgcacggacctttgtctaaatatgcttggcggtcggccttacagcggacgacctgtatatttaatatgacgactcggatattgatcttgacatgtgtgatcttctcattcggcttgctgaagccaagtacaacatacatactccatacatcgtattaactctagtgtcgacacctggtcccacgatcttacaaagtaaatataacgcaaagccagtaagacctggtggagtactccgtagagacatttaaaagctaaatgtgaaacatatttacctactgtacagaaccaaaaccgtgctagtctacaaagtacatactcttgaaagctgagatttgaactgaacacatttccgtggttttatatcatttatgcatatttctcattcttcatgatcatcacgtgcaacggcaaccacagtacataatatcttcctaagtcaattacaccactttctgctgatccttcatggcagcacgctccctaacacaatcagcaatacccctcccaacgtccgaccccaactcttcaaacccttgcacaaccccctcccgatccccttcgcccatctcctgactcatcttaaacttcccctgcaatcgctcaacacgaatctcaatgccaagaatattcttcttcaaaagctccacataattaaccggcgcatcggatacattccatgcgctcttcttatcacccccagtataccccataatgccctcttcagactgccgcgacaggtcctgaatctgtttttgcaaaaacgcacccgtttcttctgccttggaattgcagtacacactaatcttgccatacgcctgcacggcggagtagttccacgtcgggacgaccttgccagagactggcttggttgctgtgtagaacttgggcgtcacgtagtggtggtgggggccgttgaataggatcagcacctcatccgtgagctcgaatttgttattccctgctgcgttttgctcagcgagggcttccatcaaggcttttgcttgtgggttctgtttggccatgtggccgcgcaggatgccggtcggggctgtgtcatcgccctcggtcgagggaggtacatcgaggacgaaggggacatggcttgattggatgaatgagtagatcggggatttgatggccgttgttatgatgccgagtgggttatcacggatgaattgctggaggacggcgagttgtccctcggcgtggacggcgcgaagatacattgtagctatgacttggagaggactgagagggaagtgtattcaatcgatttgaagtaagtataaaagagaaaggaacactcgtataagtatgagggggtttatcactatctatcatagcatagggcgcgatttagatcgcatcccactcaatctagggctgtcatcttgtctctctgttgtatgattggtagtcggcgccgaattatcgacccgaggtccacttttctatgataaagctacaactttaaggttctagttagttagttttctgtgttttgtcagcttggtgactcggggttgtcgaaaactggagaccaactgctcgtcatagtaacaaagtgtcaagatcggtagtgccaagagctctatctagagccaaagccaccccgcattctgggcctgagagctgcgtattctcacgattttatacagccgtcctgcgatatgtcagccagtttgaacttgtccgagcttgttagtatgcaccgcctggtggcggacgctggctggaagtcacattcttttaaaatatccccgatgtatcattgcgaagattcgcgcggtttcgattggcaacagcggctgatggccaactctattccccaaacggactaacagcagtgcctgagataccttccccgagggatcaccttcccgtcgaagttgaagagcctcacaccttaagaatgctgacctggccaatggtaaaaggttacggcctgaccttaccgtaccttggacctgtggtcaagttcgaatttcaatcaatggctaccctggcattccattcttcgcttaaactggcgtccaatgtagcggtttcggcagctgattgatttgaagtcaattataatcgtgctcaaacactctgaggatcatcctgacaatcgtggaaaccccctttctcattaatcctgagggttcatcaaccatttttaaattatcgagctttgcgtcttttgagccgaaaactgaaacccctagagaagattttcataacgggtttaactaaagaatttgatattatcatgagtagggatgagtgatatacagagtatgcaggaagaatgacgccaacaaatgatcccaatgcaccaaagacaccgatcgatattttggagccaaaatcgctaaaacaaagagctcgcctgggtaggggacaaatatcatgtgatacgcgagacaaccccatccttccctaaccgatccaagacccccttcttcaacccgaggaaccgttcaatatctccacggcgcttaccctgcttatcccgcatcgtcaacacctgttggatagtcacggcatccaggaacgatctccccggatgacccgcatgaccgaagtgctcagcttctttatccgcggcctctgtgaggcgttgtcgagcagtgacgaccagtagtgccgggttagaagcttgtgggaagacagtttgcattgagcctcgattgaaagtgcttgagtttgagtatgtaggtgatggatcgacggggcctattgaccggagggaggcggcgaaatgggggtctcggccgtccatgtcgatggctaaatggtcgttagtttgtttccttgctggtcttgcattcacatgtagaagacttgaataaatcgctggcgagtgtacgtaccatcagacttcacgtcggatgctttctcctttgagtggtattttgggccctgggaggaaggtgcaggtgtttgaggaggcgagggaccagcgttgggtttgggcgcggaagtaggcgtaggtgcagacgctgctttggtttcttttggagctttgcgcggtcctcttggcgggggagccggctgcttggggtattggcgccgtgaggctgcgccagccgctgatttggcgggctttgaagcagcagaacccattgagaatgatgggctgtggatcgaaaatgttggtgtaaggcgttgcagctttttgcggagctttgagtggaggttcccgatgtcgccttggcattacggcctggacttcgggtcggtattttgccagcagaacagtcaagcaagacttctcacaaacccgagtatgtaagtcatacaagttggtatttaggaacatgtcaagcagaactaaagacggtagacattctcaaggatattgaacaagctcctgttgagatcaatggcctgatctctgaggcaggattgcataactatataactataccgtcctaggcaggcggtaaagaaagcggtctatctgtcctgacttgtgacgtcaaaaatacagttaacaaacagcttccttgggagtatgagatatgtatctagcgagatcgcctaggtagagcaacacatactcgtccgatatgtctagaaatgccaaaccaaatgttgaagggcgttggcgggcagcacatgttagcgcagctacttatctggagagtccaacccaacccgtattacagacaattgggagatgatcacatttgaagatcggcgagactttcgtgaaattccagtggaagccctgttatgtgttttgcgaaaacatactaggtatcactgcagctaggatacaataccaccggaacctaggaccacacggcagtttggcagcaccgtgagaggacaaacaggaccacggtagataaattcatgtatgttccggaaatctaccggagaccagcaaggcgccggccctgcacttcacctagcgcgcggctgccactaacaaatgcgatcacaccaacaacagccatcgcgggaaggaccttgaacaagttccacgaggtatagtagaggaagaagatcccctcaaatgagatcaatgatccgaggaagacggcatgcgagagaggggcagacttgaatgcggagggtaggtggttgacgttggcgccgaggaagagccactagagacaatctataagcaacggtcttggcgcagaaatgagatggacttaccaagccagcaagagcggggaaagcagcgccgaccatggcgacaaatgccaaggttatgacaattggcgggctagacgcagagtccttgaagatatggtggatctcgggcttcttgccatatcgctcggtttcaacggtcggcacggcctctccggggttacgatcgatcgacaacttgaacacagagctgtcgtaggcatcggagcttccaaacccgccaatgacaacatgcgcatcaactgggccggacagagagaggaattgaattggcaggtctttctgggtctggagggcatgtgttagctgcgccgcggaaagtcttttggggattgcataccaattcgactcttgacttgccattatccttgatgttgaaagggtatgagatatccaatccagtctgagcatctttgagcaaaaggaaagcctggtctgctcgctttggagagctgtcttcctgggctgtcaaggtgacgcgtaaggtatcggcaccgagaagggagacgggcttggagagcggcttggatgcagtaagtctagtttgaacacattgattagtttcatgtaccctctacttgagtcagaatacatacttttccttaaaacctccattgacaccagcaccttttgattgaacggccacggtggcatcagtaaagccccaagctgcggcggcagcgccaggtagtgcagctgcagccaataggcaaaatgggacggtggcctgccacagatgcattgtgaaagaaataacagaaaattaaacagaaactaacagaaaacagctgtagagagctcggggagatggtggaggatagaggagttgcagaataaggcggacaagtgaagccgataagcgccgatcaaccatagccctaatttcttttctgtcgacctcagcatcttccatcactttatttcgccttatctcgcacaaatacaattccaacgtccgcctagtccttacaagcttgtttatgaacaccctagaaaacaactgcggatggtggtacctctgatttcgtgagttctgcgcctatatgtcgggccctaattcccaacttctccctttccgtgcactgcggtcttctgacgtcgaccctgcccttcacctgatgacccccctataatgttatccacgccctagttgcctggtattggaggtatgggctaggcttccacttatactgttcattcactctatttactgcccgttctattcgcatggatagattatactgacaaattgcgggccatttagctttaattcacgatgcctccaaagaagggccagcgtaagtcaatgcctgcgcgcatcaataaggcgcctacattgtcaccttcccggcgctctccccgcgtacctcgcccgtcaaaaagtacaaatgagagcatacaacccgccaaaacgttgaacacatccgccagtcccaaagacagttctagcaacattcttttctacactccgaattcacctgttacaaattcaagttcacgtggaacgagtcccgaaacaccatcctcgcgtcggcgggcgttccagtctcgtccgtcacggctctcaactgtttatactccagccctagaagccccggccaccagctcaagtagtcgacggacaagaagaacagctgcacttgaaacaccccagaaagaagtatcagatattgactttccagagagtaatggtagcgccagctggacatttgaccagtacatgggcagctttgaatccgaaggaacagccgatggtccctccagccctaccagtgcctccgacatgcagaactcatcccgggttcgcaagcccaccatcagggctattgaatcttttgaatcaactaagaagaagcctcgccgcaagaacatgacagtgtccgccccgaccgtcgaaactcctgcccctgcggctaccaaggttgcaaaggttgcgaagaacaatgtttcgaagcagccaatgagaagaacaagaaggtcaaagagaatgaccaacttgaacatgcgaaaaaatgctgtcttgatcggtttcgatgttaacgtgaaggcggctggccagagactatatgacttgactattcagtccttcagccctgactttactccccctttgaatatccctgtattcttggagcaacagcgaagtgaatatttccgtcgccaagatgaagaaaaatatggcgtcgacatgcccgccaaagccacgccgagtgatgtcgatgtcgatgtagatatgatcgaccaagacctcccagcgcctgtgatcgcttcttcttctcccaccccacccaatccccccactcctcctactcctcccactcctcccaccgcagtcatcgacggctcaagcatcctgagctacaagaagcagtctgacaccaaggtcggtagcgatggctggattcaaactggctacgttaattccagtggtgaagaggttgctttgctccccgaaaattgccatccatattacccgtcccatacttacggctacgagggtctcccttttccaccagtgcgcgccagaaccagccagcaggccgatgccgatgccactcacagcttcgcaccgctcctaggagaccgtaacctcccatctgatgcggtggccccattcgtcactgaaaatgtggaggaggaaaaggctagggctctggctcgggcccctgtgccaacccttgcgactaagaagcctcgtacccgaaagcgccgtcaaaccgcggccgccgatgagcctgccgcagcggttcctgctgctactacccccgagaccggcgcacgcaagtcacagcggcgccgccgccagaccgctcctgcccccactctcctgtctcccacctcttcccttaacactgcgaccgaggtccagtcttcgggcccggctgccgccgtcgcccccgctgccattgaaggcgataaacctaaggtgcagcggctccgattgactttgaagccggcgcccaagactgaggcctctggggttcgagcatctgcttccaagaaaggccccgtcacgcagtccctttcctcccccgtcctctcgcattcgcgtgcgccgtcctccgcaccgaccaacaagcgccgccgccgccggggcatgtgaggccccggtgagggcaaaatgatgaggcattctgcccggctgatgtcgggcgatgattatcactcttcgttttcttgttttttcactttcgacctttttgtatgattgattaccagcgggcgttttcaagcatgtatgattagcatcgcggggcataccatggagttaatggtgaattatgagattttttagttgtctttgtccttgccattagtattgcttcatttcgtactctttttgccctcgtggtcctcgtaaaaggtagaatctgacatgtcacacgggtcgactttctgcttacttttgccttacatctgatttactttgtgcgttcattcgcacacaaggcaggagatgtcacctaggcacctccctcatctcttctttcgcttttctcgctctctagttacctccaactttcatcgatcgaccccgggatatggtaaggatgactcattacaccacaccttagttatccaaaacgtacttagactatatagtttcggatgccagaaatgtcgtcgataccatttcgaaaagctcatgttgaccactatgtccgatgactcagattcagactccgccgacatcgagtgcttccgggcactacccgatgacacatgaagccatcgggtcagaggccaacgctatccggaggatcagaaaagagcaggagattcccttcagggtgatcaaatatctgcgtttcacaaatgccccaccagctattgcggaagagttttctttgagctctactcgacacatgttcaatcacgatactcgatctatgattataaaacaaacgaggaacggatcgagtaccctccgaactccactccaaacacacggcgagtgtagacgctttacgtcgacatgtctcgctgcaacagtacgcggatatgacatcagccatggcagaaggctttgatcagagggcgcaaaaccgacatccattgctgcctccgccgctaaatcaccctactacaggaccccatcttgactggagcctatgagaccgcttcacgcggcctgctttttgaagtacaaaatgtggtacgcgatatgagcctagcgcagtcgatccatccggtagggtccaaacgcgtccgatgtgtgtcttcttcaaagcaggccgacgagtggtgggtccttacgcaacctgttccaggtcgcaatgcaaaatggccgaccgttggggtcgaagttggagtctctgagacatatcgaaagttgaaggcagatgcagaatggtgatggtggcttacaaactcgaagggcgatgtgaagcttgtaattatcgtatctatcaatcgacagaaacccaagatcaagaagtcatcgcgttattctcttaggactttcagaataggctttagtctgaattaacatgtagtttataataatcggtggttgaagtacagtcaacttcgtcttccttgtagacaagcagtaagttaaagtaatgcctcaggcgcgaacacctccccgaaattccctcacagaattcacatcctccaatacaccaagcaaaccacgtaagcacgtcccagcaatttctcctatgatcagattcgtctaacaaaagccaagaataatgtcatccctcaaagaccagcaaagataccgatccatggatcccaaaacccggcctccacgtccaattcaacaacccgctgcttcgcggctccctaagggggtggatgatatccggaagacaaaggagtacaagactgctgcacggaggtaagtgccatcatcttctgtcttcgactctgcttccgtgtttttgtttgcttggttggcaaatgatacatggcgacaatgagaaatctaatcgcctttctagatggacaacgactattgtcggactaccaattgtaatatatacatcatggattctttatgagcgacgtgagttctttgatacccagtaaaccttaacattctttttgattgtatatacactaacttatttcctttagtctatcttggcaagagtcctaagagtcgtgaagatcagaaacagaaggattaatcttctttttgttttaaattcttctgggagcaggaattctgtacgattcaaactagaatggcatttgagaggctttacaactgtacataagaagccctaaaacaatctgtcttctctcgtctctatctaaagcagtctcttaagggggaaacaaatccggtttaatgcattcattgtaaaatccaacgcccggagtctcaaaatatatccatggctatggataggcgagaacaacctacccagccgaaataacataaacagaagaaaggtacaacatccaaatgcataattcccaactttggaaattttgccctaaatcctccccacattgccagcctgctggggtgaaaagcaagaagaagagaagtatatataatccaaataaggtatctggaagagatggaagagatcatctaagaaacgaagtaacagaaggataaggtgggggaaagagatcgtatagatgtcacagccctgagctctaggaaccatcaactggcaacgccttggaaaggaatctgttgatcccccgagccagccgacggcggcatagatatcgagttaccgctagcgctggcgggcttcgaagtacgctcacgcatgcgacggccctccatgagaccacgcaagccgcgcttctggaggccgataacactgcttagatcaccggtccagagctcacgttgggggcggcgcagctcggcgtctgcgtcactgtggtgacgagtagagcgggactgcgaccggctttcatcgccactaacccattcggagtcggactggctgaaactagcgctagacgcggatgtcgccgtgcttggattgctaatagaatcctcgcggtcgcggcgggatctgcgttggcgcgaatgcagggagacactggtgtcaatgcggagagatggaatacctcgagcaaagctgctgagagcgcctatgctgctcgctactgatgcggaggcaccgccatgctctgtgtcggacgagcctgatgtgagtgcaccgtgttgggagttgctgtgttcgcccaatgttggcgcagtgccgttgtggccggtgtaggctccatttagagcctcgagtgtacctcctggtccaccattgaatccagtaccccgaccaccgccggcggccatggcagctgcgttgaatacagccgcggcgttgcgcccatcaagaatctgatggagtctttcgacggtggcctctaagagtccgtcaatttggtacggacgggcaagctgtagaagcgagcagagaatttgtggtgtgcaaagcgaggtgcctacggctgggagagctgaggtgtagaggtattgaaccagaacttgaagagtcaaaatggtatgggggagatacagcacacgcggtcgggaggtcggggcgaggctgtgagcagatggaacttcaaggttctcaagtaaagacttcgaaggtatagactgattgacaagagttgttgcatcggagcctatcgaaggggtgatggtgatgctcgagttgcggctcgggtgtgtcagggacggacgaagagatgcgatgtctgcaatacctccgtccgacgattcgcgaagaagttggataaagtacggaccccagcgcctagtcaatatgcgagagttgacggagatacattctccccctatagcctgcaattccatgtcggccatctctggcaaagattgcgcgagcttgcctagctcatcggatgccgcagacaatggccgcccacccgatgtcaactgcactagcttcttttgcaaggatgccggaacagaagaggagctgtaagacttatatcccgaggttggagaagtgcggcaagcattgttgtagaggccaaacgcctctagttcgaccagacagacgtgcgagaagttgattcgtcggtggttgtaatcatcgacaaggcttcgcttccggtgtccaagaatcacaaaggaattacggcgaggccaaagcactccccgattccaactaccctgcccaaacaccgatcctccagcatcaatacgaccccaagtcaatgtcttcaggtcgagagcccacagcgcatattcttgcttcgatgaagtcaggtatgttccactgacaacgaagtggccgttgataataccaccgtttgggaaacgcagtcccggcggggacgcttggctctgcatcggtcgttcgacaaggcgtccgtccggcaggcgcacctgtaactccagcttgacatcaaggaaattgtagttggagtatatcagcatagggcaacctggagattcagtgtcatcctgaatcggctcgtgttgatctcggtctggagctgaggatccaatttcggacacattcattcccactagtggagctacgacactgcgataagcgccgcagctccttcccaaggggctagtgttggtccacttgagactgcgtaggttgaaaacactgatttgttcgatgtagtgattggaactgtcctgtcctccgaccaccaccatctctgcacccccaaagccgtcaatatccacaccaagtgtaccttgatgagaggaggattcggggttattgtgaatggcggatagaggtgcactggcagatgtgaagcaagcgctcgatggcagtatcgtggcacagtgtgcgtagcgcccctgaggagattcatgggcagcaacacgagtccatgcccgcgttggtacatcaaagatgtgaatatctgacataaccacgacttccgattgtgactgcgattgcgattccgccgggttctcagggtcttttggcgtaggcgcaggtgacatgcctccataacaaaccaacttgttgtcccccaaagcacacacactgtggaagtatcgcggcggtggaacatctccagcgggctcaactttcgtccaatgtcgtcgaatcaagtccaactcataaaggttggaggtgagttggggacggctgcgtgagaggatccggcctccgaagacgtatagcttatcccccagtatggtcgtagtggcaccgacgagcggacggggttccttgccggtcgttcgccgcacgttgcacaccagaccagagaggttgataggaccagaagaaggatgctggttcagggacggagaggcccccggcgcagaatcctctcgtcctgtatcccccatgtaccccaaactcgactgacttcgcgacatcatggtgggcgggtttcctgtccgcttttcaacggagacaatcgtgtgggtagccgttgaccccctgtttcagttctcccaatatcgctcgcatgcgatgaggcgtttttctctcgaatgcgtctttctgggacaatgttcccggcgctgattgtaggtgtggtacggctcgaaatggtcgttgtggggagtcgaaaaagggggtggttccccgcgacgccgcaactttggctccaggctggcttcagaacgaggaaattgatgaataaaaactaggcagacagactaacgccgatcgtatcttagatgagcgcacagtcctggccgaagtgtcagccgtcgaggttggagatcggcacaaaaaatgtttaccgcttttgtgtctccccataactacccataactatagcaatccccccaaggaatgctcttaattcatgcatttactagggaataaatattttgtctgaatgaattttaattactttatgctttgtgatactttcccataggtccctttcgacaccgtttatcatgatcttgataccttttatcctcctgactccgggcatacgaagagagaacagaggtgaaggggaacaagaggtgacgaacttgcgaattcagacttgaacaccaaaaaggaagctgcacctgctcggaggaaaaggctggacgaagaagatgtactaactactactacattcacgccatgttgtgtaaaagcgctgatgtgcgcctctttgtatattggctttgtccttccaagtttaccctctcccctttctcataagtctatccattgccctcgcaattcaaccagatttgatggaatattgagaaacagttgagtactagttatagtgggttatagtgctccgaggcactcagaaacatcaatatcaacaataaagcccgatggaagtaaacctctggcgaacatgaggaatcgagggacgaatctattctcgcccaaggcttcgggcctcgaattgatttgatcgatctagaagacatagatgaaaacacagatgaagacttgggtgatgcttgtcaggtcatccgacactattccaggtatgatgatatcaaccagtttgtttcgaactgggcggcaggtggcttgataaacgttaatatctgtgattgaggaatgacaaggatgatcatatttatagcaaccactaagaaatgtccctggagaatatcgaaactataaaccaggcattgcatgctgttcaagcctgtgaactcttcacccagtcacttcattcgctccttgtcttactctgtgactgctagtggaaagtccatgtactctacggagtaccaaatatcacatgcccagccttaaataccatttacatattcaattaagcgagcatatgtcgttgtttgtctcatttgtgaatagtggcataaaccgaccgccctcaggatacctataagaaggtggccctgcccccagaacttcttcttcttttctttcttcttcagctctctttgcctctggcttagatcaagtgtnnnnnnnnnnnnnnnnnnnnnnnnnnnnnnnnnnnnnnnnnnnnnnnnnnnnnnnnnnnnnnnnnnnnnnnnnnnnnnnnnnnnnnnnnnnnnnnnnnnnnnnnnnnnnnnnnnnnnnnnnnnnnnnnnnnnnnnnnnnnnnnnnnnnnnnnnnnnnnnnnnnnnnnnnnnncatgattattctaatatttggacttcgcgacttggtctctgtgcttgcgcatgcctcgttgcactgtgtcattgggcttacactacccccgatcgacgcgaactccttttcatcaactgttcggcttgtccgggcgcttggagaagatgggatgtttagaatttacaacaacaatcattgttattgtagtggggatgacaccttctaccttctcttctagtagtcatcccatcgtgtgctcctctctagcaccctactactcccagagccgactttgctctcaccctgcttcgcaggcaggactgccggtacacctgccgcctcccttgcagggcccctcttcaatatctaataatccgttggatgcgactgaatctcaattaatttgatccaattaagcctttgacttacaaattgcttcaagcaaatatttacaaaatgcccaaacgtgtcactgagcactgccatatactacgctccatgatatagtactatccaaagaagtgaaagatagatctaggactactaggatagacagtctggaaatattgcaatacattgaaagagaaactatctgagaacctacgacttaaaaatctgagggcagggaaatgccacgtaatctctcagcaaattcttacaaaagcgcataattcaaaaggacggcgtaagtaggtttcattaatattgggaaactatgtcccaagatgaacccgcctcatatttctagcatcatatcataagacttcgtttactccttgagagtagtgaagcgaaggtaactataaggtattagtatcctcttttcggactgggagttggacaaggaaactcacggcttcacttcacggatctcgccgaacttcttcttggcatcctcggtgctaactgtaggtggcacaataacgtcatcgccagcctttgatcgagttagtaagatacttcgcaatagttccaggacctgggggacggggatcataccagccagttgatcggggtggtgacacctctcttatcagcggtctggagagagtcgacaacccggagaacctctgctgtgttacggccagtggaggcggggtaggccatgatcaggcggatcttcttggcggggtcgatgatgaacacggagcggatggtgaaggcaattcccttgctgtcgacgttggtcaagtcctgctcgtcaatcatctggtagaggaaggcgattttgcggtcggcatcggcgatgatagggaatttgagttgagtcgaggcgacttcgttgatgtccttgatccactcctcgtgggaatcaagcgcgttggcactctagagacagctgcgttagctaatgcttaagggttgtcaaccttggagcctcaccaatccaatcaacttgacaccacgctgggtgaactcgggctcgagcttggagaaggcgccgagctcagtggtgcagctattgattgtcagtacatgcttcacagaggtcaagagggctgggaactactgacactggtgtgaaatccgcagggtgagagaagagaatagtccacttgtcaccaatgaactcgtggaagtcgatctcgccctgggtggtgagagccttgaagttgggggcagtagagcccagacggaggctaacagacgatcagtattgtatgcatcttgaatatagaggtaggagcttacataggagcttcagccattgtgaatagatagatcggtcaaattgagttgtagatgaaagggagagaggaaagtaagatcgagttggcgagatacgaggttaataacatcccctccgggtttcccatagatacatggattgaccccaccttaacctcatctggctggttcctgtcccaccgcggcttcgttctggatggcgtgatcattgttccgcccggcagaacggccatgattggcgcatgcacggcagcacacagcgtgggctgtttagcgtgcgtgatgcaatatcaactgtggatgagcatttcgggttccttgggtttctttttacccctcaaccttacctaaccttatgttagaactacattacctacaatatacatacaacacactacatgcacggagtagctctactttgcaggtagggggcctgccaatatatcactactaccacgttattgtcttgctataccctttccttctagccattggcgcctaaatggaaaatggcaattttgactttcctataatcatcctatgggtggctcttattaggtacatatctacattggccattgtcataaccagagaagctcgatatagctgaacctgccagttttctggctgcgttgtaaccaactcgatcttatttcaagcaatcaaggaataggaatgaatcaatatgtgcaggctacctagcatggaacaattcctatctaatgtttctacatgaaaaacaacaaccttggaagtctgtactattgattgtgtaggccctaaactacattttaggaaccttgatagctagttatgtaccctctttcaagcttattcggccgacatgattttggtcaggaccaatagaaacccgaagtgatggcgcaatatcacctttacatgatgaatggtaccctgtcatcgaaaactcactatgaagtaaaatataccttgtacgtcaggacaagggaggcctaacacatgcaaatctgtatatcttctccacgccgattttaatccgacattctagacaattctgattcaataagtatttgacccacatacatatgtagtggggctaatcgaggcacatattataacatacatcatctgaaaatacgttcgtcttttgctgcctccaagtctaatattaccttcacactataacatcaccttgaagctatgatacagtacatttttccaaagtttgttttcattagaaaagagttggcttaaggtggcggaccaaacaatatatgtattcagctagtacgatcatctatatgaatagacttatagtgagcttaatggacactacatatatacaggttgaatctacacaataaatcttgatatctttatccacttctgtctcagtatgatcttagatgtttgattgacggcataaaataaatatagatttaaacttccggttgccattagagatactttcagagaggataagtattcggcgcgagttgcttactctagagtaggtagaatatatatcttcttcaaagcatttggaatagttctcaatatcaacatgtactgaccaaatctaaagtacactagtaatgcctcaaatgtcgatcagtcgcggtaactagcaattgaagggattctgagataatagtgatcgatgccttgataaccatcgaggttgtttacaaggagagctgtgtacttctaacggtttgtagtgccgatcatgatcgacccatcacgtgcgaccccagacccacatccgcgtcaagctcagtgccaaacattccaggaagctcctgcttaaactggatttgatagctttttcaacagttcgcgggatccttaccccattgattgtacagttctatttagttatactgcatttattgcacttactacgcttcctgcgtatattcgctgccttgcactgtcacttaatcagtgcaaaacaatcgaacagtcatgccacccaaacgcaagtctgaacgcgccgtgagcgcaaatgagtctgtttcaacgccttccaaacggcttcgaaataatgtagatgcaactccaacttctgcagctccagcttctgcagaatcggcttcggtggtaagcacattatgcaggggctgatcgtcgcgtcccatggcttctccactccaacggttgacatagcgctgacatgtgtggaataggttgatgttacaccccagactggagaaaagagaggccgtgggcgtccacgtaaaaatcccgagagctcggctcccaagcctatttctgatgcccctaaacgtggccgtggtcgtccacggaagattgtttctgagccagaacctgaggctgtagccccaacgggccccaagagaggccgtgggcgtccccgcaaggactcaggtatatatatacgatatgtggtgggtgatatatgctgacctgggactgtgttatcaggcgatgcgacacccatcacaccgaagatcaagaagaaggatggtcgtggaagaccccgcaagaaccctgtgccaaatgaagaagccgaaatcaccgagtctaaggtcgcgcctgcggccaatgtcattcctgaaactggccgctctttctggctgatgaaggccgagcctgaatctcgcctagaaaagggcaaggacgtgaagttttctattgatgacctggctgctgcagaagcacccgagccttgggatggtacgtcgaacctgtctcgaattctgcatccaggcgatcgctaacagttgaacaggtgtgcgcaaccatgttggtaggttttcctgtctaaagtcacggtagctttgaccacaagaatgatactcacagtcgaatagccaaaagtctcatgcgcaatatgaagaagggagactttgccttcttctaccactcgaactgcaaagtccctggagttgtgggagtgatggagattgtccaggagtattccactgatggtttgttgccctcgaaattacactgcttgatcatattgctgatcaacaacccatgacagagtccgctttcgatcccaagcacccatactacgacccgaagtccaagcgagaagacccaaagtgggtcgtcgtccacgttgaatatcgccgcaaacttgggaagcaagtcaccctccaggatctgaagtctcatggccagaccggaatgccgctcgagaatcttcaaatgattaagcaatcccggcttagtgtgtcttctgtgactccagcacaatggaaatacatactggagctggcaggcgaggaaccacaagaggagttcatcaggaaggagtgaaggaggaataggcatgagaaagcaagccgctacatgcaagcgatgcacagagagttttatctcgtataactctcccaagtattttctatcgacggcgttgtcggttgaacatgggttatctgcacaagcgaattgaagcgtattttatttgactcgatgtgtcctttataaatatgtgcaagggatagactcaccggaggagtccgcttctcttggatctattcgcaacagcagcaaggtcattgccatacaggctgatcgcattgctttgcagcttgaccattccccgatggccgacatcccagcagcccgatttggcacttgcgggatggtgtcatatcgctcttgtcactgatcgccctcacacatgtgtgccccaaattatccagtcgtccggaacaagctgggtcagaattgtctcaaacctttggaaacacccgtcggaccctggttaatgcatgcgtggtgacggatctagaaggcggtatcgggtatgtctataaaagtcaatattttccgccaccatatccgcactcagtcgatcaatatccttggcatccggcgcccagttcggagtcatggaacacggcctgagcatcccggagctatgacgctatgtatgtgcaggtctgcagctgtggggtactttaaacgttcgtgacaaaagaatagattggacctcccgaggtcgggctagtcatactttgtaagcagaaggggttggcccggggtctcatgaagaaacgaggggaatactcgccgaatgcgggctgccagccaatcagagagcgagattattgcaaatctaacaaaccaacggaggacggagactcggaagagtaagtctatccgggtggagcgtctttatcggcttatcaggcggggagctcttcgggcgacttggaactttttagccctaggggggtttcccctcctctattaaccccctctctccctctctccctctctcccctccatgtcccgtattcacctacgctttttgtacaaaggtccatcaactcttacttccttcatcgccccgcgtcgctcattccacagctcccccttcgtcatgtctgaactctcagtgtaccttactgccccaaatgggcgcaagtacaatcagcccatcggtctcttcatcaacaatgagtttgtggcttccaagtctggcgagaagcttgcttctgtgaacccttcgtatgtacccctctgaagtgtgttgtgtaactttgagtactgaccagatctccagcgatgaatctgagatcacgtcagtgtatgctggcggtgaggaggatgttgatatcgccgtccaggccgctcgcaaggccctcaaggacccctcctggaagctactgcccgccactgagcgtggtgtcttgatttccaggttggcggacttgattgagcagcacaaggagactctggccaccatcgagacttgggataatggtgagtaaagtgagcgattgactatcaagataagaactgacatctattataggcaagccgtatcaggtctctttgaatgacgatatcggtgaggtcaccaacactctccgctattatgctggctgggccgacaaggtgtatggtcagaccattggtactaccccggccaaattcgcctacaccctccgccagcctattggcgttattggccagatcatcccttggaactaccccctagcgatggcagcatggaagttgggccccgcgcttgcgtgcggtaacactatcgttctcaagcccgccgagcaaaccccgctcagcattttgtacttggccagtcttatcaaggaggcaggtttcccccccggtgttattaacgttgtcaacggccatggtcgtgttgctggtggtgcgttggtcacccaccccggtgttgataaggtcgccttcactggttccaccatcaccggccgtgagatcatgaagatggccgcaggcaccctgaagaacgttacccttgagactggcggcaagtcgccactggtcgtctttgaggatgcggacctcgagcaggccgccaagtgggcacacactggtatcatgtacaaccagggtcaggtctgcactgcgacatcgcgaatccttgtgcacggatctgtatacaacaaattcgttgagcttttcaagcacaccgtccacaccaccagcaaggtcggcgaccccttccacgatgacaccttccagggccctcagatcaccaaggcccagtatgaccgggtccttgaatacatcgaggccggcaaggctgagggtgccacgctcgcttccggcggtgtggcgcacaagaacgtcggtgatggacgtggtttcttcgtcgagcctactatcttcaccaacgtcactgactcgatgcgcatctcccgcgaggaggtgttcggtcccttcgttactatcgctagcttcaccacggaggaagaggccgtcagccgtgctaacgacaccacatacggcctcggcgccgcagtctttactcgggacattgagcgcgcccaccgtgttgccgccgatatcgaggctggtatggtctggatcaacagcagcaacgacagtgatttccgcgtgccgttcggtggtgtcaagcagagtggtatcggtcgcgagctcggcgaggctggcttggacgcgtactcgcagatcaaggccgtgcatgtgaacatgggcaccaagttgtaagctgtttatatcaatgaggaatggatctcttccattgcacataagttgatttgtcataagttgatctgtatataatgaccgaaccttttgttctcatccctgcaaaacgcaaacactgtatatctatttgatcttgttcctatgtagccccacagatctcgacgggccaacgtcaatctcatgtatcgcctccacttctcgcttttgctcagatacccgcaaaaaggggaaaaaggaaaaaaagcaagatcgaactactgagtgcacagcccaggtaaagttacttctcgtcatgcagatcaggccctgcaccgtgcagtgacatgacggcaagtggttgtcccgtgcgcaatcaggagaaaaaggaaggggaaacctcaactctcacaggctctatgtatgtccatcaccttcgcgttagacaactggacttgcacaattgatgcccaacttcttccgcccgtagctgcgatgatgcaagccttatctgcatgcaagccttacctggaccatatggggcatggtgcatttgaggattgtactgagccgttgaagctgattggtcgaacgatgcttactttgtataggttcacctcggttattgaccccgtactagtaactagcgaactaactagttaactataccatctctccctcgatctgattatcagttcatattgaaaaaggtggatccaacacaacccaattcccacctctccatctatccctgcatgacccatcacgccctaaaatcaaggtgatacaagccggctgcaggcacattctcgcagacatgcatggcacggatggaaattgcaaggcgggaatgtttttttttttttttgcaacgcggtatttgggcgcaaatctcgagtcaggcaggaaaagggccagattactcttcgaactctgggattggtagtcaagagtaagtgcaggttccaggtccaggtcttagcgcccaccagcacacacatgcatgaatctcttgcatctgcatgcagagtcggtcatgtgaaaagccacctggcgccggtctggaaggtgatctgacggtactttttgacgggtacttgctatcatgattgagttctcgagccccgaactctatgtatggcttggcggctagctgcacgaattgatgcagaagagaaagtttacgcatagtatccgtagttcatgggtatttcagagttcagagctctggtgtgatgattcgcattgcagacacgggattcctgcaggagattcaatagcgcgtgggattggagagtttgggattcaattcaattgccgaacggacttggatccctgcagctgtcctacaagttcgctcgaaaggaaaaagaaaagcaggatagcatcttccagatccaagaggcacggagtacggtgtaccagtgacaacatgtagtaaaagtgggatagtaagccctcgtgggggtggcttggcatatcccacttctcatcctccatctccttgataatattccctcttcgatatatctctgtgaacagtataatcgtaagtacggtgacaacctagattccactcgaatcacgcttgcacacgaataacccgtttaatgagcctgacatctctcagttcccaaatagcggtgtccactccatcaccgatcggcatgtctgaaattcagaggtggacggtcaacgaagtcagtattccatgcggttcgccatttgattcgctctttttgattatttcttttttctcgctctcctctggttctcgtgtcggtcagacgtgacgattatcctcccgagcgtatcacagaacaggaaaaaagaaaaaagaaaaagaaatctacgccaatcacagacaactaactcgactagccgtatctcgacatcccaggaacgctgctcgaagggccctttcacgatgtggccaaaaacgagttccggtttgtggatatctgggatcacaaactatatcgcctcgatctgacaaagggccctgactccttgacggccattgatactgacgccgctgttgggtgggttcccaaccgttctggaaatcaactaaaaattcacttttgctgacggggaaaaccacgtgggacttttagcgtcaccgccaatattgccaactcatccaatcagctgattgtgggagccaaacatggattcgcccggctggaccagactaccgggaacctctcctatatccacggtattcgtgaactttggggcgaagatgaggggaaagcagagaggtaagggtttgaaaaagaaaaaaaagaaaagaatccacagctacatcgaagaacgtcgactaacattaaccccaattgttacaaaatataggatgcgtttcaatgatggtgccgtggacagccacggccggttctgggccggggccatgaacgacccaaagatcaagaagccggaagcagaaggggtcctattcagactggatccagatcagagtgtgcaccacatgctggcaccggtgacgatccccaacgggatcgggtggaatctagccgacgacgtgatgtacctgacggattcaccgacaggcaagatctttgcctttgactttgacgcttccaccggcgcgatcagcaaccgccgagtgcacttcgatatcggcaatgcgctagagccggatggctttgccattgatgtcgagggctgcatctggagcgctgtctacggcggcggaaaggtcctgcgaatttccccggccggaaaggttatcggtcagatcgatctgccgacgcgcaacgtgacctgtccagcctttgtcggcacagagctgtttatcactactgccaaggatgatcgtgatgatgaccggctgccgcagtcggttaggtacggcggccgggttttcagggttgatgtcggggtccgcggcgtgcctaagaatgagtttcggttccaggactagggtgtatcgtgtgcatcagacatccttggatacgtagctgcatagtacatggtactccgtacttcgtacatacatagcacatacatactgccgggatggtacatgcttagttcgatttggtatattcttattctactccatacctcggcatccaatgcgacgtgtatccgtgcaacgtagagcagaaggatcaattgcgcatcactagtactttgcacgtccccaaaaaattagatccaaaaggcggtattggtagctaacccaaagaaaaaaaaaaaaacacagacgacaattcttatgcagcgtgaagctgggtggatcgaggatcagcaaacgggcgagcacgtcggtccgcgctgtcattgtccggaaacctgggtctgggtagtcttccactgcaggccacgcaagggacacaaacccaggtttatagatcgaatcggcgttcgcatttccatctcacatcctgtcgaccatatactccatacgtacatgcaattgttaatataggacttggccttgattcccctggtttccgttcggtttcgaactcggctagatttcggtcgaggctaggtagcgcgtgggcaccagcactgccacctcttttttttttctctggcggggcccgccctgcagggcggaggcacgaagtgataggtggtgtatcgcaatgtgctgtgctttttttccgctgttttcggactatgtgggtgggttgatccgaagggggaacatctaccgtacctgtcagcgggagatatgccaatctagatccgacaaagctattcttctgctttttcagggaaaatgcggttgcagcggacacgagataatcggagatccgtgcggtgaggccgaagcagatcataaaaaggggggacagcgttatccacttccgaagtgcagagtcaacacctgaatttcggaaaagaaaaaggaaaagaaaaagaaaaagaatcgggttctcgatgaatccagtctaatggattccggatctttttaacttctccggctctgcacaattcaaatagttcgatgtcacgcatcccgaaggcatgtcggggataaccagactcaatggtctggggacggcggtttgagattgtcagccacaagttgacagagagcacagccctactccatacggagtaaggagcagaacgaagagaaacgtggaattcgcttccaaattctctggggaacatctaagccctgttcgatccaaccagtcagaaccactggatctatcagaccgcaattgtctgtcgaatatgcatgattcgcccgaaaaaaagaaaagaaagaaaaagcaaaggaacaatagcggggactctgctgcagcaaaagactgacagctcctctaaccctgtcggaagcgacctcggcacttggacattgccaacacatcgaaagaaaatatatcatacgttgtccgtacagctttacccacttgtaggagtcggaagatggaaccccatattggaatgcgtggagatcatggcgtcttctcggacaatgcttcaatatctcggcaagatcaagccaaaacgcaagtgccaagaagaggcgcttcagctgtggcagcgccagctcgcctatctcataaaatcatgaaagcaatttattttccattcgaagaatccactttggtgcagtgcgtccagactacggagtacgaagtcgacactaaagcgatctccactgcttatttgagggtcgccacgcggagtctttatcccgtgacctcggacaagctcgacagcctccgggaatagagctatccacacgggtttctcatgcagctcatgcggctagtggaatcctggccggatccctttccgcttggtccgatcgtggagcgtcaaatcggttgtgatagagaagaggtgtgtcccctggttgctgtttacctttctgtttatttactttcgggttccaaattacatcatttttcagcggactatcaatgtcacaccaaggggtgaaacgaagtgggttttaagttgtctcgtctggtgtctgttctctgcgttaccctgttccatgacgtcaagtagataccaagttatagattgtacaaaccttgacctcgaaacttcaaaggcacggaactctgccagataccaacggtcaacggcaacggccctttaaccgggacacggggaggatttggtgatgcacaacatgcatgtattataaactttgcgagaacatcctttcttcctttctgcctgtgtactttttttatatcccaccctttctatctagattaatagtatctcgggaatttagtctctccaagcaccaaactctcggaaattgacaggacggcttactaggcttaccaggcaactattggggattgcctgactaactatacccgagtgggtatagatcggacaggtggaaaatggagtagttcggcgtttctcttttacttatattgccatgcgtcatccgttgactcccagagaagagaaaaggaaccttctaggtcccccatacattgccatccatggatactatcctccactaacgcccttctacccgtggacgcttcaaacctaccacacttgactccctgaaaatcccaaaggaattaatgaataaatcgaaagaggcaaaaaccaaaattaaaaaaaacaaataaaaaaaaaaggtctccacctgtccctgtccatgtccatggtgacggcgcacacttgcagctcccgatgattcgtgctgtgcatgacgatcgctttccccgggtgcttaggtcctttcctagatgtgactaggggaggatgactctatagctggatccggtaatggcctataatagggggtgatatcggtcactctgacagattgacagattggacgtattctatatctacttcaatattgattttgatttgatttgttttgattttcctttctttttctattttagcatggcaattattattaaaaaccaaaaccaaaaataaaaaggcccaaaaacaaaaataacaaaaataataaaataagcccaatactccgggggttggaggtctccataggagatgcccaactatccgccagactgggtcggacaagagacaactaagttgtcttggagccatccagaccaggtgatggatcattctctcaccgctgcgaattccaacggttgttcttaagcttgccccattttccaatttcctcactttccctgactttgtcgcttttgtcactttgcctagcttttattaagggcctcggatcttttccccatctttctagcttccttagcttccttgtattgattatctctcctcgatcctcaattgagtgaatcgagtctcttgttctatatatccctctcactgtcttcatcgtggcggccttaggaatcagtgtgttgactgcaccgtattcgggctcacattccctcaacctgtcactctattcagatcgatatccatcgccgtcaccctccctctctcatactcctcgagaacccagcgacgaggagagaggggggttccggtcatgccctaactcccgccccgtcgtgggagatttgctttctatgtcgcaggattctcgacgtgctggttcattgtccagagatgtgacgcaaactgatgaccgtggaagtgacaatgatcgtaccttcaaccgcaatcctacccgccggccacctcaacgacctcggccccagtcatggcatccatacggacccgtggagccaccactggaatccatgtcgtcccgacccattggcgttcatgccatcttgaatcatccacaagcaacaactgacctggccggccgtgagccactgagcctaccgggtccatcatcctcacctcgtccccaagggacctcgcccataatccgttcaggatatgcattgacgtcgcagccgctatctccttactcacggcctctgatgaatccagcatcgccttcggcgcggtttgtcggcgggggcggcagggcttctggtcagtctagtgtcgcccagtcaccactacttcctcatgaacctttgatgggcccacgcctacccgtcactagttcgcctttgcccatggagacgggcctacgctcaatagcacctctcactagcactcagcctccctcgctgcattctaccagtatgcattccaggcgaattagtgccggcccggggcctctcagcaacctgaaatcccaagaaacgagtcctatcacgtctcattcaactttcaatcactttggccatgcatccccagcagtgaccagtgtctccctcgcacaaagcaccgcatcatatcctactgcgcctcaatatatgacattggaccctgtggttcgaaccgtctccgcaacaaaaggccccagacgccaacctgagcaacaccccacccgagccggaacaccacaggatagttcccttccactgggcatgataccatgcgtactagacatgcgatccggctcctccagccaagccgaaaagcgcaaagctaacagcgacgcatcacgacggttccgcaatcgcaagcgcaacgaaatgcaactggagcagcggctcaccgcacagcaggacgagatccagcgcaatatagaaaccgtccgtcgccagagcgaagagatccgcttcctcgtccagcaacgagaccactaccgctccgaacgagacttctaccgcgaccaactcggccgcacaatgtctctgagcgccttaccccccaggccctcctctccacgctccgcccaaccaaccctcctccctgcatcagaaccgggcaccacgacatcgtggtcgggcgtcgatgctgcccgatccgcttcaggcacacagccgacttccaatccgccccagggaaggatgctcgaatcagttcagtctcaacctacttggcctgcaagtcctccctattcttcaacccccattgcatccgccggacgggcggttgctggcccgcattcccggtcgccgtcgctatctgggggccaactgcctccgctgcagggatcgtggtcacgtccttgatttgagtttgccggctgccgaatcaagcgacaattattatttctttcattcttgtcttttttccccttttccttacactcttaatcatcctctctcttgtgtatgccactgctaccaggagagacaaacaagcggtcactggcatggccgctcgcaggtggtctacactcctttagtgaggtggtctactcaaaagtgcctcttcctttaggctgggtgtgtataactatctgcatttcttcctgtcctcatcaaaagactcgtctggttctgcaaaagtgcaatttatacttctctgtattcgctgtcattatattaccctgtcttacttcctcatcctgtccctctgctttgattattctcgctctctctttgtgtatggattgcacagcggtgatacctccatcggcgatgtattaaatcatcatttttgattgaagttggaagatatttgaaaactggaaagcccaatatgacagtttttaccacttaattgttgaaatccgacctaaacctcgtaataccaccatctgaggactcaatcgccgaagctgtctagacgtatctaggaaacgcttggatcgaggtcttaaaaagcttagcttgccatgtaactttgagacatacaatactaggaagtgattggtctatgggtaacacaggctaaggtagcacaaggtggttcatacgacatcataaacacatttagaatctatcaggcaggccgtagataatatatacaggtgctactctagttctaaatatctctatggtcttgatctagttatgaaattattcatgattaataataatggagtacaacttagtaattatctgattggtccgtgaagttccggtggaagcccttcttccaccggaagttcctccactcaccgaaatctccaagcagttaagattccagacgacactcagcacagccaattatcgccaagaaaacttctcggatcctcgaaatgcggggccccgagtttccccacggatgacgggtctttctcgtattcctctcatattaaggcaatcctcacagtaactacaacatacaaagtcgggctaagaagaaaacaacatcatcataagagtggattgcagtccaaactccagtgcgaaaccgttcacgtgttgtcgcagtcgagttcttttaacactgtccccaatcaaggtaaatttttccgagttccgagagaggagctactctagaggttccctagcgctaatccctttagcagcaaacggaggaagcgaccggggtccgttccgatggatctgccatcctctcttactcttctggaggccttctccaatgccgaggatgtagaccggttgaacgggagccaggttgatctaggtaggaacacttccgtcaagcatatccccaatccccgcatcgtcgctgacgtctctagatgccttcggacagttcatcgcatcggggaggaagccgatatctcaaccacatatgaccttgacgaaccacgtgccccagacatatcccttagacagttatcttacgacgatcaatgagctgctctcgccgccgaccccggatctgattctaggggagtacaatcagccctttgaactgcagcgaaccttcgaaactcggcttccgaatctctctgaagaaagtaaaagttatctacacttgaaaggagctctcaggatagttcccgtcgacctccggaatgagttgctgggggcttatatcaaatatgtccatcctctcctgcctgtcattgatctgcaatggtttttatcaagtgtcatggtcgaggatgaatcccgatttccgagcccgcttcttcatcaagctgtcatgttggctggcagtgcatttattgagcaggaagctgccgtcaaagccgggttctcgtcacggaaagcactgcgaaggacattattcgggcgagccaaggtgagattgagaaagacagaatccatgacaagtcaggactaatctcgactctatcatcagcttctttatgaattcgagaccgaaccagacgcatacacccagatccaagcattattgcttatgatgcagtggcatggaagtggagttggccacaaaatcccaacatactggtttgatctcgcgtattccacagcagagcgcgtcggtctccttgggagtctagaaacaggtagtttttctcacaagcacagactatggtggtgtctctatgtgcgcgaccgcattctctccctcggtttccgtcgaccactacgaatcccaaacagcgatgtcacaatgtccctactggaatctacgagatactattcctccgagccctaccacgacctcgtcctagttatgctgggagaagcagccgccatgctcaactgggaaaaccaagagcggatgatgcttctattcatccaggagattaagcttgctcattgcgtgggcgtcattatcaatcttctgtatcaagatgcttggtcgccgtcgccgtcgggggactataaatacgccatggtacccaagtcgaatgtgccacaggctgctataactgaatgcgaacagcttctgaagacctggattgaggaccttcctgccccggcccattatttctccccgtcacttctgcacggttgccataccgagtctccggagattgtcctcctcgttcaccaagcgttcctctatctcctccatctcactacaatgtcagtactctaccaagatgcgtcgagccgaggagatggtcttcagacgacccttatatcggaaatgagaggcctgacttcgcaagtcaacgagattctcaatgagctacatgactgcaggatacttcattttctccctggaagcactattactatactgattattattctggaggcaagccttcctgacctgaaggtttcggatgatattgtgaggatgcaggccatgtcgaacttgtatgcctgcgaggaagcggctgggtatttactacaaacatatcctgcggctgagattgttctgtcacgggcgcagaatgctcgtgggcatctcttgggtttgaccgcaacttgattgcggagcgaagcgaagcaattacacgatttaaaaagcatttagtcattttagcgtacacagaatgaaaccaaccaagatactattatttccagggcgcgatatccgtacctcctgtctgagatttcagtaccgccccttcctaattaggtgcaaccaagaatactgccatatattctgcctaattcttgtctacatggtgaaagaacatgcattattcctatatgattcaaccccctgatgataaagcagttgatgaagcagttgtacctataggatacgatatgacaggagtgacctacttctattaggagtttacatacaaattgtaggtacctgctgtcttactacttttaacacaagagcggtgtaaagtcagaaggcggtgtacatgatctatacccaattaggaaggtacgcctaaattctcaggcagggggtacgaatgttagttatccaaaggggggtatcccgaaattgcggggaccccggttgtgaccccggtgacacccgttttgaattggctaaagcaccatctcgctatattcatggagcaaaagactagtgtggtgccaaagccaccccgtacatcgcgagaatgtgatagatgtctcagccagaaactcaaggtagatcccttcataacactcctggtttgaaactatggttctgacagtgttcgcatagtgtgacggcgcacatccatgtgtgctttgcactcgcgccggggataaatgcgagacatcccagcgcagagtgagacggacccgcggacaaaatccaaggggcagacgtcgacatatgaattctggagtacacagagcaatcgcaccagcgccacccaaagattctaactcgatccatggtgctggagtagctgaaatagcttctgccccagagagctcaacctcctgtccggaacgcctttcgaaagagctgcctccaggtgctaatgcctcctatccggaacgctctccggaagagctgcagtctggtgctaatggtttcgcgattgacttcgccagacaagtctttaacgaggaagaggctggccggactctgaccggtgcatcgatccctatccctgatgatacggaagctcctacgttggacaactcattatggcatcatccgacagaggtagagcttcccccggaggccgtgatattagccttggttgacgtctatttcgaccgtatgcaatggtttatcttgctgcttcacgagccctcgttccggcagactgcacgcaggataacttcccagactgtttggagacgccaagatctcagtactaccatgcttgtcctggcagtggctatgattgggctgcattcggtcttaccagatgatagatggcctgggcacgaattgttgcgagaatactccgttgatggggagaagttgatgcactatttgaacaatgagatacaacggaatctacttgatatctcaatcgattgtcgaatcgaagctgtccaggtttgcctcctggtttcctcctattatatttaccatagatcgccgagtcttgcttggactgtctctggtatgggtgtgaggtctgccaatgcccttcatctttatacaaaatcagtccaatatgaaagtccagttgtggatgaaattcgctctcgttgttggaatcatgctatttccagcgacacgtttgcgtctgtcgtctatgggcgaccttgctctatcgacactgagcttgtcgctttgcattcgcctagagaaatggacgacctagccattgatccacttctgctggaaaacgaatggatatttggcgatgggatgccaaaaacgacagctggatttttcgctatgaaatatgagatctacaacatcattcgagacatactttcacggtttcgtcgtcttcaattgagaaaagagacaatagaagaggaccttctggcaattgtggaagctgcacaagactcagaggaacaattagtttcctggcggaaaagggttcctcggctattcgatttcgagttttggagctgtgacaatcgcttagagcagttccaacggcaaatcgaaatgttaccgcaacgcactaaatatcaagcagaaacaatcatcttacaggcggcaatactccaactaacatacgatggagctctgatacaagcccatcgacctttacttgagcagaaaatcactagttcttgctcgcgcttggtggtagacgcaatccacgagtcgttccgggtggccactgcagctgcgctacgaatatctcacattccggtcctccgtttcaagcatcatttcgccgaatccttcgcctccctacagcaatttactgcaggagtgatcctttgcatcctgccaacctgtcaaccttttacttcagctgcacacgaggccaaggctggaatcatacgtattatccatgctagctcagctttcgggccccgcaatcgcattgccaagcagaccgtacagcttctgacagagttgctgaaagtaactgtcgatcgagagatgtccagcgccttgagacgcggggtggaaacaattattcccaggcgtatatctgagaggggttccattctgaatgcgcagccgcgtatagaccatacaaggagtgattcactatcctcgcgagatacctccctcgatcagtcttcaacgtcaacaagtcacgcactgccccaggcaatacacgaccatagtagggtgaacgaccgaatagcccaagcacccgtcaaaccgcctgaatacccgtctgccaatatcttcgaacaacttgacgatacattcgctgcctttggtgagcgtgagtggagccgaggtgcgatcagtgagcatggcttctaactaacgcgttaataggcatgttcaacttgatatctgatgatcaaagtagtgcttggaattggggccgtacggtcccataacagaggatcaaaattgtataaacaggcggagttgatataacagctggtctacagaattgacggttgtgagggctagcagggctaggatgggcctgagcaagtggtttaaaagggccatgaatagagggagaaggatgtgaaaacaagccaggagaaaaggctttcttggtccatattgtttgttttggctttggaggattagagagacttggctgttacaatactgaggaagtacggtccttggaattggggagaataacgaatggttgctatagatatcttgaaggggagttttatgctaaatacagtctctagaagctcttttatcgccaaatcaaagagaagctacactatcaaatagtctgaggagcgctaagcacatggcgtgatagtctgtttggtaactataactgtccaatgtcactgaagaaatagaactgaattttatacatccctcttttctcctagacgtaagttgaagtaaagtggcagggtgcatacttacactacgaagagagcccaaaatggttgtattaaacatcatgtagtgtaacaaatgtatttcaaacttaccttctataactaatcttggaactatatactttttctttgttgtgacgttgcttgtcttctacatatcacatcttttaagtgcagtcggttttccacattaggctgtttgctatatgtgtggtactataagacgaggccactcctattgctcaggcaatgtttgccagacctctctttgcccctattctacctgattccgtgtctccataaaattaccttagaaacttcttggcaatgagagatctacaaatctaccatgtctatcggtcagactacctcctttctaggcagactgttctagatacttacgagtctatgcgagtgaaactcaacctatgcttaggatccacttgtggacaagtagactacaaagaggaagaaacataagggcatgaacttcacattacgcaaccatagctgagaaagatgcgagaaaaaatagcacacaagaaaaacatggtatgagatacggaaactcagccggaagacaaaatccagaaaacccatatcaagatatcaataaactaagcctcatgagaataacaaaatgctatttcaacgcttgtagtagaaagaaagaaaatgccatcggcacgcaattccattctaggaatgcgcttagagggcgaaagcagcgatgacaccggccatgacggcaccgaagctgatggcgttgcggccagcgctgttgaagacgggggtggccgaaggagaagcggtggggacagcgctggtggtgagacggatggaggtcaagggggtgctggtggggggcttgacgggagaaacaccagtgggggtgaccttgggggcgggggtagtggcgaaagtagtagcaacagtggtggcggcggtggtggcagcggcagtagtctcagtctcggggcagatagtggtggtgatctcggtgctctcgataacggtggacgcagcaaccggggtggaggcggaagcggtggtctcagtggtggagctagcgacggcgctggagctggagacaacagcggcggagataccgaactgggtggagtactggtactggccggtaccctcaacaacgagaagcagaccgtagtgggtgacgtcggcctccaagtcagcgctaggagtccagctgaactcgccgctgttggggatggactcggcaagagtctcgagggggaggacgttggtggagggaccgcgcagaagaatgagggagatagggccaacagtggtgggagtccacttgatggtgtaggccttgccctcgggcacgatctcattcagaccagggtaggtgatggcattgccgctgggctgctggttgtaatcaggagcagtgtaggcagcagccagagccacgaaggcagagaaagcggtggcgatagtgaaacgcatgatgtagtgtcgagattgacaaagagtgactggggtgagggtaaaagaatgactatcgttgaagaacgaaaaaaatgattgtgagtggaatggagagaagaggaagaaagaaagcgagaaggaggggagatgaactactttgtacatttctagtttggaggtgcatgcaaaagtggggccgacattaaaagcccccaaaaccaaaagatcgcgcagaccaaccatatcgcatctcatttcggctacattttactttgtgtggctggacttgtattgtaaatacctatcacactgacgctataccgtcatcctgttgtatcatctgcggtctcgtgcccaattatgcagcatcttgtcctcgtggggcatgcgggccggctgtggctcagatgttattagaacaattatgtataatatcatgctgtacgtgacgggtcaagtaccatcagaaccaggtaccgtttctaattggtgggtcccccggaagttaattttatccctaataacggccgacccttaatgtagagaatgttccggtagggaagattaaaaataccactagactgggtctaaggaagaagtattaaaaagcattggaaagtattcacaagcatccacaagtattaatgaaataggaatgagggcatatgagacaaagacagggtaaggggagtctctgttgacatatttgtttacctttttaaggcttacaaggttccaaggttctgccaataccaacccgtggaacccttggcgaccaaaaccttcgaagatgacccgacgataacccacggtagccatagcccttccgaacatcttatatatatgtagctattgtagacatgtttgtactataagcaatcaaatgcatatacttctcaaattgcaaggcatttatgatcctcatttccaccgtgtttaggaaaagaggaatcgctaaatcttcggagattgcaagcttacgagattgcgccctcaagcctgggcccaatgacaggcgtcgtacgggtattgtaccatacagccgcacagggcgctgtgccttgcaggtaccatgtgtcctttctacgggggaaacaagatttcaaactgaacctgcagggtaagattctgatattcactgatgttcactgatattcacgattatcacgtcaatcgcaacataactccacaccgataggcccgtgccatatcaaaaactacatacaatcgccgatcacaccagttcattattagggttgtgatgtctatgggaaggatcaacttgatattcaggggtcgaagttgaccagcttgtatagagtgatacatagtatcctatgttgtttacatattgtaatccttcatttcctactaagacatgtaagaatgaaaaatcaaaatacgaataaagaatggatttgtctcacctggcaattcgcggtgatttgctacgttcctgtgcctgaatttagggtgggacttgtgccaagcatcttcgccgcaactatcgaggtttgaatgtttcttaaccgggtctcaggctggaatcccaccacattaggtctattcataggctcagcccttcgcttaatacgagacgggaatttttagctttcgtctgagggggaaatgtgaatcacatgacgttcagcctcatggcaaaagtgggagccaaaaataaaaaacgaagagaaaaaaaaaaccaaaataccaaaacatctcatagactagtcatatactacttcgtatgctgcacgcccgatgcaacatgaatcacacatcgagccattcaaccccgggtacccggaccccttctgtacaactagcacctcgaggcgacgtgaagtgcttgtcattggctgcattgacaaggttcggatccaagccaactaaaccccaacttggctccaaacaagccccgaccaagccctgtcagaacaatcagggaaaccttcgcccgtggcggcccaatctcaccggggaccaagcggacctaaaatggggccgaatcgaacaggtctgctatgcacctatgagtctacctctactcttcccaagtgacagtcttagtctggaggaattcgtcgaatccagcaattcctccgaagcgaccaaagccgctgctcttccatcctccgtggggaaggacagcctcgtcgtggacagtcatagaattgatatgaacggctctaaaaaaaagacccaaagttagcctcaattcaatctccacccggggatgtgatctgtattcggaactcaaaaacccacccagagtcaatttgcttagccacccgtaatccgcggaacaggttgttggtgtacagagccgcagtcagaccgtattcggtgtcattggccagtgcaatcgcttcgtcctcggtgtccaccaccatgaacgacacggtcggaccgaacgactcggtcgcgtacaagtccatctccttggtgacgccgtcgacgacgatcggccgcatacctgcgttggtggattcgcttgtattaaggtcgccatacagcagcttagctccctgagacacggcgtccgccacaagcttcttgttcttggcgacggccgcggcgttgaccagaactagcgcgggcgcgtccttgccgaacaacttttcagtcgtctcagtaagtttctgtcggaacgcatctgcgatcgagcgctgcacgacaatccgctcggtcgccatgcagacctgaccgccctgtgtattgtgtcagtgtgatatcattgtctcgaatgaacattacgtacgtgcatgaaggatccaatggcacagttcatggcagccctatccaagttcgcatcgtccaaaacaatcgcggacgccttaccgccgagctcgagaagcacaggcttaatgtgtttgcccgcgagagaagcgataatcgagccgactcctgtgctaccggtgaagttcaccttgcgcacagcctggtgggcgatgagcgcgttggtgacggccggggcgtcggagggctggtgaaagatgacattcaggcatccggcgggaagaccggcctggcggaagatgtcgcccagaacccagaaacacttgggtgagagctccgagcccttgagaacgacggtgtttccagccgcaagagggagtgcaatggcgcgcatacccaggatgtaaggaccattcctacatcaattaagttgagttggggccagctgataaagcgcagtataccagagatcggaagcttaccatggcgcaattgacagaatcactccgtacggctccttgtatacgatgactcccatgtccttcccggcgacattcggtacgataccctcgatcgtggatatccggcccgcgaaatccttgatgaagttcaaacccatattgaaagtgatctctatgaaaggccggccggcaccggtctcctcgcgctggtactggatcagttcctctttgcgtgagaccatgatgtcagcggctttcaacaggatgtcgcggcgctcggctggcttggtctttctccacgagagaaaggcggcttgggcactgtcgactgcgcggttggcattgtcgaccgacacgccgtagcaatagccactcagctcgccggtagccggggcatgaacctcgaatttgatatcggtctcaatggactcattattgatgataagcggggtcaccgccttattagattgcgccattgtacgttgaggagttgaagaaggatattacgaaggataatagggggggatatctctttaatacagaaagggagtgtcttttcgaatagaggggctgagctgactttccagcagctctgatcttaaccaaatagagtggcgggggttggtggggacacgaaggaggtaagactctgataggtcacggtttcattgaacgtagatcgattatgtcggtctgggctcacagtcagcagtaagcttattcaacggtttaagaagttatctccggtgatgtcaaccccaaagcctataataacatgccgatctcggagttaccggggggggggggaagaaaagatgacaaagcagagatgcagtgagatggagatgagatgaacgacatgacatggctttttgaattattcagcgtctatgatcaaaaggtatatccaaaaacacattcttcccgagtccagccctatcaccatgatcccatatccccatgcgcctgaaagatgcgaattgtgacctgcacaaataatacaagccgtgccctcaattggcccaaatcttcgtctcggtcgaattgctgcccttggccatctctgcgaagggacacgccgatcccttcggcgcagtggacgcgctttgtatggacggcgccacactgtgtatggaaggcgccacaccatctatagagggcgctataccgctagaaatactggaccggtcatcctcggtcgagctaccggagctgctgccgagaatgcgcttttcgccgagatatccctcctgatcctcggtatagttgaacatggacatctcgtcggcgaactcttcaccgtcgctagagtgataccgggcgaagagatcgttctggatccagaggatcttgttgacggcgcgcacgagcgcgatcttgcgtcgcagcgacaggtgtgggtgggacagcatggcttcgatccagatatcttggatgtagcccaggcatacgccgaggtgaatgtactcgatgttgagaggtgttctgcgtacttgtccgctgtgcatcatgctgtgttacacatcaggttagcgttgcacgataatctcaccccggggacggggatctgggaacggatagggctgaacttacccaactttgttcaagtaccgccagaattccattgttgtcgggtcctggcatagacgcgtcaggtaccagcgcaggaacagcttgcggcgctggattttcggtgtgtcttcctggaggtagccctcctcgggttcggtctcgtcgactgttgtccgtgtgtggaaggcgcgggatgtgatgtcatattggagaatctttttatataccaggttgacgactgccgggatcaattgtttgatgtatttgttgccagagagcagtgcttcgatatcacctgaagggaatgacgttagtggctgactcaagggtggtccatggtaaaagcttactagagttgaagtcgaggaagctatggaggtacttgattcgctcttccaagcttgtatagagcagtttccggtcgacatgcattggcgcaccagccgatcctgatcctgatctgaaatccatggcttctgacactttattatgttgcgaacagctggggtcttccttgtcggggtggggaaaacggttggaaaggtagatcgagagtatgaaggagaagataaaactggagcacctcgtggcaagctggcggatcgagtatttataccatcgatgcgcgatctccgttcaagattactccgttcaccgttctcctatattggatgcaacacgattaaattgaaagccactaaactataaaacacatcctgttgggctccgctccaaggaatcctggaaggggacgatccatgactcttacccagaaaagcgacattacccgatctcaggcgagctttttccctaaaaacttcgattgaagacccaagtaaagtgctgatcgaatcagaccatagggcgagatgacttagtgactctctaaagtggagtaatcatctatttgtaggaatgtgtgggctgattcctgcaatctccgaactagacgaaaaagcgaaaaaagcgaaaaagcgaaaaaagcaaaactgcacagccaagaacggcaagatccatgggtgccgtgctatcagactcggcaacctgaaacaagcgactaggaatgtcgagaatactgtaggctcaactctaaccagccggtgaggaagctgtcagatgctagtataccagatggcgtttttagcatgccggggatataaaacactaaagtcacccatgttcaactgtcgcgaaccattgcccgtgcaaagcgaattaatgcgattaaatggatgaatcggcatttgaatctgactcttgttcactggctccggaactccgctacgggctaaacggtttctcttaggacccgtgatgaagtgggttccgttcgggtccgacggggttgcggacctggtgatgctattcgtgttgtctcagactgttgggtacatataaatacgtggtagacatgcatcgatcgtccgttgattgccttggaaatcgagcgttgcatcaactgcagtccccagattgtaactatcacaatacaattggctcggcacttcacagcgccccttaataagtgtaagctgtatgctagttagagattgccgaaccagtggatgtgtgggcccgaaggattgcgacctcaacgagtacaaagtacagactgtaataggggggaatcgggactaacaaagcaatagcgtcgaaaaaaaaaatcaggaaacgcctgcatgtcaaccgacgtggaccctctacccgtaatgaaatctactttgtacacgcgaactcgcgtcgtgtgatgacatggcctgatgggattctccgtagatcgggaaaggatagatcggatgtggatatggcatgatcaatagtccggagtgaaatctcttcgaactgagcacattagggcgaaaatttttcacggcccaaaattgaggcccttgccctgcgagcttggattcttttaattctccgaatagatcacacggagaaaggctgtccttgttttctcgatccggatgtttcgaaaaacagccgcggtagacgatcgcttttgccgacttggttccccagttaggtctagaacaggactggttctcgaatggccccctggaaccgtttagtttaacggctttattccatgggtgtgggatttctggggaaatgtgacagcgacagcggcccaggggttgtcgaaaataaccggccagtcacaatattcctaatgaaaattgtgaaaattgtgaaacgggggcgtcaaagaaagtgctgatcgcggctcgtccacgggcatttgcaataacacgggggattccatttcgagacaatgagcccataaaagattatatacaagactccatcctccggagagtcatcgcttccagataacctcgggtggcgtcttctgcccactaattgccggtcgtcgtggcccgtgcagccgcggcatcatacagagccttgatatccgcctgccactgcttcacctggactctggccacgcgacggtcataggtaagcagcccgttgacctcgccctcgacatcggtcgtctgggtccagacccccccactgcatgcgtacaggcggatctgatcctcgagctcggtcaggagaaggtggctacggtaattccatgccgcaatggtggtgtcaatctcgtacgtctggtcaattgtatcgatggccgcttggttgttccacagatgctccatggatacattactcccgatgccgccgaattcgccctggaatccaatccgggtgggatcgtaggggctcgagggtgtggaataaaagggggtgccacattgtggatttgcgtaatggtgattgtcctacgagatgttagtgagccacgtggctggagcctgggccacaggggcacatacactaaagtctccagcgccgtggtcgtcccagcccgtcgtcgagtccacaagccgagtggggtccagctgtctaacccgctcggtcagctcaaactcggggtagtattctgtgatctggccccaggcttcgttgtagatgacctagatagtggttaacgtctggtctttcggtttcacatcatgacttacccaagttacaatactagggaagctcttcaattggtcaaccaacaggtccaactggcgagtgaactcaacctgctgcttctcgtccggtaggatagtaactgagtttccatttgcgtccctcttggactgcgacgggcgcagggaaggcatgtcctggattacaagcagaccgagctcgtcgcaggcttgatagaacagatcggtctcgactttgatctacattccacggtgtgagcgcgagaaaccatgtgatatgcaacgcggcgacactcacatgcttgcgcaccatgttgaatcccaacttcttcaacatttccaaatcgtacaccatcgcctctttgctggggggcgtgtataaaccgtcgggccaatagccttggtccagagtaccgaacatgaaaatgaattctccattgagcaggggtcgctcaattccgtcaaccgtacccctggagactgtacggaatcctatatagctctccactagatcttcgccaagtttgacagtcacattgtacaggtttggggagtccggagaccagagtttgggcgaagatacgatgaattggaatggctcgttagtggggcctttgtgggttgcaacagtcttgccatcttgatggacagtgacttcggcctgggcggatttctccttagcagagctgtgtacagtgatatttactacacggtcagaatcaagcagcatttccacaaactcagagacttaccttgaccatccatgtttgcgtcaagatcgagttgggtgatgtgattggatggggcagcctccagccaaacagtttgccatatcccactgcacggggtataaaagatgtgactaggtctcagggtctgctttccaatggggatcacatagtccccatcgtcggtaggatcatgtacgaaaacaagtctgtattcaaagtcagatgtgcagactgtttaggaccctgagatactcacagctcattctgctgatcaaacttcaggtactttgtcacgtctaccgcgaagcggaagtatccgccacggtggaagcctgccttttcaccattgacaaagacagtggcttcgtagtctacggctccaaaattgagcagtacctgttcacccttccaagaaggagatacctcgaaggatgtcgaaaaccaagagtacaaagcccaatcgctttgaatgcctgcgaatttatcaattctcgatgctaacgcagtaagcaggagaggacctaccggacaatccactctcaagacacgatggaatcaaaacatcctgcgcaagtacctgcccaaaagggggctgctgaacagcatcgagaccttcggcattttggtacttccacaccccgttgagattcttccattcagaacgctgcagtaacggtcgcggatattcgggccatgggttcgttccgactttgtcggtccatggcgttgtcaagggaggctccttaagagagtaacccgcactgcgcgccttgttttcctggtgctcggtactagggagagctagaccagttgccactagacacgacaagagaaaactctgagccaaatgcatgttgactggagaaactcagatcttggcagtatacacacacagtgacagttccaaaggtcttcggaagatatcacattttgggcatgatctggacttaaatacatcggaccctgcttacgcgggactagcagactcatggcacggtgagtccctgcatacaacatggccacttggcagagatgcacccacaagggccaaccctgcaggaagtacacaggatgcccggaaactcagattcactgaggaccggaagtatgtcggccgctggctgttgtccgaacacagggagcatcacccaccgcttggcgttactaacagcgcaggagccaaggacagcagccaagagccgacggtcgatgcgcgaatagtaattaaactacccatcacaaggaatgagctggatcttgcctgctatgggcacgctgggttctcgagataggtggaaattgccgacgtgcaataataactgtctctcggcagttccaggagcgacaaataacagcaggaagaggtattccgtattccacggagcatttcgcgccagtaaaaacacgagtcacgcgacagaactttcggtctgagccgactgctctgcccaatactgcgagaatattaacgccgatcgcaacacacgggcgacagccgatctggctttaccccagacatgcatttcccgtgcaaggaaagtaatattgcttgctgtctcatctgttagcggagatatgcagcgcatctgcatatccaagtcaaatctaagaatgaagtcatgtttacatcgaatgatttgatcttgcattgctagttcagcaaggatcatgtttcctggccaatcccttgcgtccggattgcatggcacaccacgtccccaccctgagcgggatatatatttgacacaatggtctggccataatctgatctcgatatacttaccattcactcgctcctcacaatgaactagcattgccctaccccgcagactccgatgacgtggtagcttgaggttgtatcagctttcaatttaagaatccgaatggccgccctgtccctcagagtcaggcttggcgcgacgatcctctcttccctattggcgggttgttttgtccgttgctgtccgcttaagcccaagacgttggctagtttttggcttcgttcttccccacgttctacgagcggggcttatggtgagttgagtcgatgttccaatcatatattccgaacttggatgatgggaatcgtggtgtgatagaaaaatacataaccagcttttaagcaaatgaatactttgtccttgattttggagggttcttatctctaaccgatctatgtatgacctttcctgactggctaagaaattcacttctaacggctgacgctagcaagaaaacctcatcgtaggctagtgtcggttatgccagccttaattcggaatacgtacatgtggcagattacttgcatattgtatattgtactagaaagtaacgtaacgtcggcagtggatttcttttgcaaaaaagaaaatgatagatggcagtgttgctgtgcaacgggctcggttacagccggcaatattgtacagacggacaatccgattgcgaaagatggttagaaaagcccaaaatcccaaaaatcccaatgtgaactaatgtattgcggtagataggacatactactgtgtagtacgagggcttctagggaccatcacgacaaccggcctaatcgggttaccgcttagggctagttttttctgccggttgggctattctgccaaagttagccgattacatattcaccgcattaaaactaattattttggagtaggataaaaataatctggtcacgtgatatatacacacacgaggttatgatttacttgcttcgcttcgctccgcaatcatactatactccgaagtatgaaataatttgagtcaagggaattcttgctggtactagatgctcacatccctagcctgaattttcagtacggccttcctaatttggtaatccctatcggcacagtcctaatttggtcgagaaccgggtacctgcctggacacttggttctgcctaccgctctcttaccgcttccaaacttgtacacggcgaagtatggcagaaatatggcagaattcttagttgtacccgatcaggaaggcggtattggaatttcaggccgagcatccggtacgggcaacaattcccttcatttaaattgcttcagattcatagaccaggtggtccctaaatagcttcatctcttcgggcattatcaggcattaatattactcctactgatgataaactttggcacctaatcgtgtcgaaaacacataccgtgtgttggcgcctggcaagttggttaggcggtatttttttttctcctaattttctgcccggcaaaaaacccattgtcgtgatggtcccaaaaagtcctcgtaactgtggttgatttgcgctttgaggctggcgaaatggttaaactatagctgccgactgaagaagaatttacctcgtgccaagcttctcatcgtggctataaataaacttggtgggcatttccatgcctggacctaataacacgtaatatttgataacattcaaaagcaataatatgatatgaagatatttattctgcgttcctttcagcgtgttgtatcatatgtgtggtgtaacgggacatggtgagacaaagccaagatccgttaggaattgtagatgcttgacctgtgatcatatgcatctggcccattgagtagaagatagtcgagatatcgtgtaccaaagagccagaagataacggcgcagatcccaaagtatctagctaagggatttgcctgtatctaggagtttgcgagtggcgagcggcatttggtaagtactatctagtccaatcacattaggagttctccgaaatcccagggaacactcagaatcgaacgatacaatccccatcttctcgtcagcatagtgaccgctcatctccatcgggattgaattgatatcgggatttgggtggaacaatccgggaacgctttgtatgaccccgggattagggcagatcaccgaagttctacaatgatcaggtccacttatctatcatggcgtgatctgtatcaaatttagccctaacagaccccgggcttatcatatgtaggtatgtattggctttaatgcggattatcgaacttccgggattatcttctctcgtgacactgcattgaagcaaaccccgtgttgacttcccgagttgcactttactgccaaacatggcgacgattatagaattactccccgagtccgagagcttccgaatctcatgatgttactcctcttgtacttcggggtttggggatgtagactatcatttcaagccaacgtatgaggccgctggaagtgttataaattgaggatctccccaggcttaagataaggatttccattctacacaacagtcttcaaagcaaacactcgtcaaagtacaacaagcatctcaacatggttaccgttctcaagaagtacaaggccgcagcagtcaatgctgagcctggctggttcgaccttcaggaatccgtccgccggacaatccactggatcgatgaagcaggaaaggctggctgcaagctgattgctttccccgagctgtgttagtatcacagtcccaagtaccggatgcaatgtactgacaagatgaatagggattcccggttacccctactgggcttggaaggtgacctaccaggagagcctgcccttgctgaagaagtaccgcgagaacagtctcgcctccaactcggaggagatgcgccgcatccgcgaggccgccaaggccaacaagatttgggtgtctcttggatactcggagctcgatctcgccagcttgtacacgactcaggtcatgatcagcccagctggagatgtcatcaaccaccgtcgcaagatcagggccacccacgtcgagcgccttgttttcggagacggcactggcgacactaccgagtcggtgatggacaccgagctcggccgcattggacacctgaactgctgggagaacatgaaccccttcctcaaggcgtacgctgcctcgctcggtgagcaggtgcacatcgctgcttggcctctgtaccccggaaaggagaccctcaagtaccctgacccttacaccaacattgccgaagcaaacgcagatgtatatttcccccttctttatttttgcaacgacttgatctgattactgacaagactgctcagcttgttacccctgcttacgcagccgagaccggtacattcactcttgccccgtggcagacaattaccgccgagggaatcaaggtcaacacacctcctggaaaagagcttgaggaccccgagatctacaacggaaatggccgtatcttcggtcccgatggacagaacctcgttccccaccccgccaaagacttccaaggacttcttttcgttgacgtaagtggagaatatttttgttctatcagaacgtcaaactaattgatcaaacagattgacctcgacgagatccatctgagcaaggctttggccgatttcggcggccactacatgcgcccggacttgatccgtcttcttgtcgacaccaaccgcaaggacttggtcgtgcgcgaggacaaagccaatggtggtgtcatttacacccggactattgaccgcgtcggactttctcttcctttggattcgtcggctcctgagcctgagaccgagaactgagtctcaattcgagagtatgtagatctatttgccggactctagcagatatgtgtattgtatgacagaagacagaaataccaacttattcactcttttaccttttatccatagtttgagtgtaacttccttttgctctgtcacctaaaagaggttgagccgaactgcagtgacttggttcagacctcgagggcccagacccgtgaaacgcgtggacattccgttctctcaacattcttcacattctcatgcattttttcttatacctcaaggtaacaaattcagagtccaagacctccaaggtcaagttgcaaccatgtgcagaccaatactctacccgatttgtcgacgggccggcgagcagacaatggcccggagagtgtaacaatggaattgtctggggtacaatgtctcagatataatggagttgtcgccggaaacagaagtaccgaggacgacagtcgaccattttgacttgactataccgaccactccacattcccagcgtatttcatagtgtaatgggttttgaataattctaagatttctttggaggactttagagtgaacaaaaaccttaccacagcgatgtgcgcacttagtcccaaaaatacccttatcacccttatgaaacagcattcgatctgcagaacccaagaatgattaagttcactcttacactaacactacgtagagtaaataattttaagctcaagctcgacgtctagaagctgtcaagcaatgacattccgtaaaagttgtcggagctgccacgtgtcgatcatcacggaatgtgagattttgctgcaagcagaatttaattcttttaatagttgaacatgtaggctattatgtgtgtctatattagaagtatcaatgagaataaaagtggaagtcgcaagggaagcctggttttctaatttgatatagggcaatgaagtatagcttccccggatactattttgggtcgcagttgccaataaaacacatagtgacgaggtgacgaggtgacagacattttcacagcctttatccccacattatccaactatcattgttaccctcgtcaagagaacaagccctttgtctctgttttcggacactccaccttcctcttgattcagacctcgaagaatagtctatacaggtacgttacttttacttcaatctccatcattccccgtggggacttccgttctcgcccagtaacctttgtttccctgcatccggctacatcaagtcacttataactgctgttctccagccattcatctcaaatatattcattcctgaatcttcattcttcattcctcattcctcattactcaacaccagcctcctgacttcttaccaagttagggttatcagcatgccatccatgtccaagttctcccaggcatccgtgctcggactgtctttattggtagccttggctcaggctacgccaacagtgtgagtggtatctctctatcagagctaaagatctacaatactaaccgacattggtgtatagtagcctaaaattcaactaccgtggtgacaaggtccggggtgtcaacctcggtggctggctggtaacagagccctggatcactccatctctttttgacgcagctggtgatgctgctgtcgatgagtggtctctttgtgagactttgggtgcgaacgaatgtcgctctgttctgaccaagcactggagcactttcattaccgccgacgacttgaaccaaatcgccagtgcaggaatgaaccacgtcagaatccccgtgggatactgggccctgaagcgcttggatggtgatcattatgtcgatggtcagctagagtatctggaccaggccatcggctgggctcgcgccgccggtctcaaagtcattcttgacttgcatggaggtacgtgtcaggacctatatattacatagcaaccactgaccaacaatacagcccctggctctcaaaatggctttgacaacagtggaaagcgcggttctattcaatggcaacagggtaacactgttgacgataccaaagatgccttggaggctctcgccaaacgctacgaaggcgatggagacgtcgtgactgcgatcgaggctttgaacgagcctagcatcccaggtggagtgagccaagatggtctgagacagtactactacgattcatggggccttgtccgaaaggcaagccaggacaccacaattgtcctgcatgatggtttcgtgcccactgaatcatggaacggcttcatgagcgagtctaccggtgtctggtatgtgatgatggacacccaccactacgaagtgtttgacagcggtcttctcgccatggatacccaaacacacgttagcaacgtctgcagctttgccaaagaccatgttgtgacctctgataagtgggctgttgttggtgagtggaccggtgccatgaccgactgtgccaaatacctgaacggaaagggtgtcggtgcccgctacgatggtaccttctccggtagtcagtatatcggcagctgtgagggcaagtctactggatccgtggatgctctgtccgaggatgaccgaagcaacattcgtcgcttcatcgaaggtcaacttgatgcttacgagaagggtactggctggctctactggacctggaagaccgaaggtgctcccgagtgggacatgcaagcgcaaatcgctggcggtgtcttccccaaccctgttactagccgtgaattccccggccagtgctgagcgctagctggtatgtgccttgattctcctcctgtttttccaatgtcgcatggagcatgctactgattttgccgtgtttttgttttcttttgtccaacttttgtccagacctgattcgtattcttttaattgtctgctgggcttgcgtataagcgagttgattcctcgcggttttatggtgtgcttaatttttaaggctcgctggttaggttgtgaaactgataattcaacggataatcgtctactctcttaaggccttcttgctggaggatagccatcttccctactagtatttagtaaactcccaacctaggaaggtacacgtggagactaccggggcaaccttgactaactttatctcaaaatgacctcgataagtaccttacatggtacctcccctttcctggagaaggctgtgttttagtaggccttctttttccttctttttcttttttgggatctcttgcctagcgagaaataaaatgaatcacaacaattccaaggttcatttctcattcgcaatgtataagaattaaggtctcatgaaagatctatttttagcaagtacaataagctccgaaaggatatctgatggattgggatatgtggctgggattctgggaatgctaaaaatggaataggtggacctggtggtcatgcaaacataacaatatgagggtgtaaaaagcatatacaatgaaacggaggcaatgcaaagtcccaatgatatcaaaatgagcaaggggtcttcttcctacctcagagcagtccaagtgctccaaacgccgcaacaacgtcagtgtcaacgttgactagccattcgtcttggaaccgctgcgccccaccacagccagcaataacctcttgcagacgatggcgcacaaagtcccgaatcatgaagcggtggattgcatccccggactgccagtcacggcgacgaatgatctcaggcgattcgacctcttgtgtggtttctggcatcgccgttgcagacccggctggtgcattccagcataccaagtaatcggcatttgggtcggtacttccgtctgctaactcggtaataagatctgtccatacacttagatatgattgcaggaaagagaggatgtaggcagggggtggcgggggtaaagacgggtcgagtggcgctccttgtagggccaagagttgggtgagggcaagtacgtgaagtttcttttggttgatactgccaatgttatcgtagtgcaaaaaccattcggtcatgatccaggtcagagattgttcttcggatgagttggtcgcggcggcgaccgatgaggctagaatggtagggctggccagcgcaaggcgcgctagcacagagtagtaatcactctcgacgacaccgaccacaggtgaggattttctatttgggccagacgtctgactcgcttcgtgggcagagtaaaggccttctagcagggaggcaaggaatgagctctccagaagggattgggaaatgacacggtaggttgcttcgctaccgccgtcgacagtctcagcgccgcgaagcaataaatcaacaaggcgaggtatcacaccgagacgttgcttggttgtggatttgagtagtgattcaaggatcaccaggagttggaagcggaaacggtcactgaggatctcctgtggcgcgaggaacacataagattcaaggatatgaatggcctgcggagtgctatcggttgctgcttcgagaatggggaacaaagacggaaggagtgatatgatctccggcgaggcaggagatggcgtagcctgaattatggcatgccagagatccagtgcttcatctagaaggtaaacaatagtttccttgaatgattaggttaagctgggtagcatgattcacacgggacttaccgagccaggttctactgagctttggatcagtggaagaatgagagagtgatatctcacagactcctgtcctagcgattggatcaaagatgacagcaaagtcaagatagcttgtttcatcaaatgttcatcaccggagctttcccacaatggtgggagtaaagagatgattcgatcggagaagggagtgatctaatattgtgagttgcacagtcgccaacgaaaatgaggcaacaacttacatgatcttccatcttgaccaccaccatacggaccgtctccaaaagccccatcttagtatccgaggattcgacttcttgaacgagagacatgagactctccaagatggtaggcgcaaacgacataaatgcttcgggtgaaaactcatatgagtcaagtacactccggagttgtcgaccggcagtaatgcggacgaccaggtcgttcaaaggatcatgcttgccgagcaaatgctggaagatctggtaaattgcgttcatgttcaggtcgcctgccttaaccgggacccattggccgagaacgagcgcgattcttctcctcagaagcttgtactctggttcctgagactggacctcaacaaccatggtatgctccaagaatgcgttgaagtccaggtgatgttcgagactggccgcagccaagccgacggcagaatacagcgagtctttcaacagcacattgtggttatcggtgcctggagtataagtgttagagccacgcacacttaatacagctcatcaataacttactcgcgaaagtatagaatacggtcaacagacgtggaatcagtaaatccttgaagtgaatcacaagatcaaggaaaagtttttccgaacatgaacggattgagaactcccaagcgtcggcgttctcttcctctcgcttctcccagtcctccggttcttcttcccactcttggaaatcgatcttgcggaacctgaagaactgagtgactagtagctccatgacattgatcacaaattcttcggtgaagagttgcgttttgacgagttgaacagattgttttcgctcctccttgtcttccggtgtctggtatttgaacgtattcgcagggttgaatgccatttttgcgcatgcacggatcaagagcaaagcccggaggccggtcttctcgggtaaagatttcccttcattttcacccccagcaccaaggctgtcatacttctcgccgagtttgacgactaatgaccaatacgacttgacaagcgagatactatctggcagcaacgcgaaagatgcggggtgtgtctttgccatttcaacatgcaatttcgacatctgcagcaaatgtttctcgatagcgcgatggattggctcgggtagattggtagacccatccacaagagaatggaatttactaaagtgcgaatgggtgagctcccagaagccctgtacttcttggctgcgactcgggtgttcaaagccagcaatgatcaggcgtcttaagaccttgagagataccaaactcaattcgagcgtctccagcaactccccttcgctggcaccaccttggtctagtatcgtcccccattggttgactttatcaacatagatgccccccagtaactggaatatctcaggcgatacagactgaagattgtgtcgcgttcgttgaattcgtgccgtagataattccttgattatttgtagcaacatgaggagagttcggggaagttggagcgggtttgctccaggttcgacggatgatcggagcgaggaaataatgaacagaatggcatcgggcctggttggaattaggatgagcaaacatacagctgcatattggcttaccagtcatgaggaaactcaaagcgcatgattttggcaatcatcagcgagttatgaagagctagtagcggtgcgggctcaacgattcctgcctcaagagcccggctcttaatgcgttccttttcttccggtttaattgcactttcataaatgttagcacgacctcatcttggcgatattcccataacatacttcggtgctgtcttccgccagtatttgtcaatgccgttcttcagttggatgatggcgaggtagcgaatttcatttggtagggagtagtcaagaaaggcattctatatattatcaaaggtgttattgagtgaagcagcaacaaacaagactgtcgactaatacctgtagaaaagagtagtacatgccctgtttctcccagtattggagctgctcggtacccgtctgaacttgctgctgagacgagcttgccgcatgtactagcgcattgagcacattttggggggtgagtgggttggtctcaccctgtacttcgacggcgaaggccatggcgaataacggtgctgatcgcgtgaaagaagacttgtaaagcctaaaggcagttatactgaggcatgcaccaaatcagaggttcattgaggtaccctgaaccactggacgttcatgaaaatgaactctgcgagagttccgaatatgtcaattgatcaacggactgacatgtctcttcggagctccagcgtaaactccccgcctccgggaaatccatattccggtcccgctgaaccctagggctggaccctagcgtttgtcccgattcagaactcctgctagggctcccgaccgtttcccttcggtggagactatgaggtgtagcctcaaaccagtttggtcggattatcaagctaccggcaacttccaagattgttctcgagtaaaaatctctgattcaccactgttcctggattcttcccctcgtgacatacctatgatgtagcatgatgcaactacaattcctaacctgaagtgaagtagtcatgatgtggatgatctagagtgatatatatataaagcgcaattcagttcaatgttcatctcactatctaccaaattatctacacatacatcaccacatacaaaacctgaaaacatcatgcctaccaccgaagaattgaagcatgtatctctcaacgccgagaaggaccttaattcataccaggccaagcagggcagcggcaagaagagtgactcaagtatgtgaagaaattggtcttagtcggtctcatttatctaataacaattcaagctgccgagtcaggtgttgacgagatggtcgagcggcgattcccccagcccacgagtgtgaagtacggccctggctcagctgcctctggtagcgaccaccgtgtgattcccgaggatgagggcggcgttcgtgatgaccgcaacaggtaagccatacacccaccgcttctctatgcgctatgaatcgttctcattgttaacataacgttctttccagactcgctaaggctggtcagttcgagggccctggcggcccggaagacaaggtctaggtcaagaaccgtcgctgaattgcccagtaaaaatgcataatacaaatgatacctgatgacctgtactataatgaaatcctttcattcatttgatgtgttcaagccccgacttatacccgaccaggttaggcctagtaatgaacctcaccaatgttaccttcccggcagggacaatggataccaatatcgacatcgccagccccgctttgcgattttgttgagatttgtagaatcgtagagaatgttcattccgatcattttctggcccctttcaaacccaagtgctggcttcacttgtgccacccgaccactcaggtgagaaactgtaggcagtcccaaggtatatcctaagcacggagtaatatccatagatatcagtagccctatatccatagtccacggtgtgtacacaactccgaaggttcatgtgggtttcctctcccacgtgctcacctgttcttttgatcacgggaccgagcacgcccctaggccaagcccagtgatttgcctgggcaccactcactaaccatccaaatctgcttatctcaagaaccctgggaaatgcaccacatgggcacgctagcgccctatagttccccacctcgcttggatctgtctcactaacggaaattacgagaaatcagcagaagtagattacattcatggatacttgctgtctacgctatgtgccaaagtgcatacatgtatgcccagctacatttatgtacagttaatagactacccgtgggctcttcaaccacctaaagctgctatcaggggagaagcacggaaagaccccggaactccgggggcccgttgccatggaatagctaagttagctaagcattcgccttggcccctcttgactcgagccctcgaacttctgagcttttcggccaatcagagggctccctttctccatgtgcctgcatcatacaacgtctactctacccagacctcatctcaacatcaggtacggctcacaaagtacctctgtgagacttgaaagaaagctgaaaggcacacacaaccacgtgtacctgttcggtataccttccttcaaagtttatctccgacgtagatgcacgtgtatcggccctgaccccgtggaccttccatacatattctggcatttctaacattcttgacgatcttttcttctttcttctctaccatcctcattctcctcggtccgcctcggtctcatctcatcagctacatcaatcttattgattttctgcgagatctatcaaaatgaaggctgtcatcgcggttttgctgggagtggctactctgacagttgctcagacagctactacctctgagcctgctctcgccgacattcaggctgccgaaaccaccaagccggaggttaccgtctccgatgtcaagggcctggcttttgatcgtttctatcaagtctggctggagaacattgtacgcgacaatgatcaattcctggagtctcaaagacaccatggctaacagcttgataggactattccgatgccgcctcagatgccaacatgcagtggctcgcttctgagggtattctcttgtatgtttccaatgttttgagccatgagtgagatgacccattctaatattttttaggaccaacttctatgctgtcacccatccctccgagcccaactactgcgctgccgctggtggtgacacgtttggaatggacaatgacgacttcaatcagattcctgccaacgtttctaccattgctgatctgcttgacaccaagagcatctcgtgggctgaataccaggagcacattccctatgctggtttccagggctacaactattccaaccaggaaacttacagcaatgactacgttcggaagcacaacccgctggtgctttacgactctgttgtgaccaacaacactcgtgcacgtgctatcaagagctttgacgactttgaaaatgatctcagtgacaagaagcttcctcagtgggccttcatcactcctaacatgaccaacgatgcccatgacaccaacatcactttcgctgccaagtgggagcgttcttgggtgagcaaactgctcactgacgagtatttcatgaacaacaccctcctcctcctgaccttcgatgaggacaagacctacaccaacgacaaccgtatcttcagcattcttgttggtggcgccattcctcaagagctcaagggtaccacggacaataccttctacacccactattcgagcattgccagtgtctccgccaactggggtcttccttctctgggtcgttgggattgcggtgccaacatcttcgagattgtcaccaacaagaccggttacgtcaactacgaggtcgacaagacttatctcacccttaaccagacctaccctggtcctatgtcaattggggacgacaccattggcaacacctccacctacactcccgtgtggcccattcccatcactgacagcaatgagaagtgttctgctggtcacggtatcctggatgccgtcaagcaaacctacggaaaactgaactcgacatacgacaccaagccgttcccctgggaagccaagactcactacaacgacaaggtcacattccagcggtcaaacgagaccacgaacgcgaccgccacgactaactcgacagcggcgagccctacccacactggcgctggatttgctgccacggctcctatctctactgtcatgctcggagccatgctggccatcgctgccttttccctctgattgagctgttccttatccattcttactagttgaccgggtgtgggtgtgggtctatgacccttgatcatctggtcccgattgactgggagggaatgttttctccaaatctaggagacgtaaaacacaatcagctatctccatctggaggctaatatcttaagctttagttatgaatccaaattcgttattatgatatttatgtcccattaaagactactagaaggaccataactcccactgcctagagactggcccctttatgtagctgatcgccttttcctgactatctaggtgtcggataccgttaaacactggatcttcttggtggagctaggtactttgcatgatcgtattgtactcaattttctatagccccgaaatgggatatccattctcaaccatgccttcggttcaaccagctatctttcacagacgtgctgtcttgatcaagatactcttagtctcaagaaaactgtcaagactatacagaagcccctcccggccactcccacttattttgaacccaccaaatgcagtatccttggcatttgtcgggcttgtgcaattaaccccaacaatacccgcatccagagccttcgccaaccgaacggcacgatcaagatctttagtaaagacagcagcgtgcaggccaaactccgaattattcgccttctcaatcgcaaacatggcaagtgggaagttccacgggataataagtgctaccacgccatatggctgcttgacggtcaggtttaggtagtccggggtgttgaggctggctgtcccctgcgcggtccaaccgccaccagcgaagtatgcaaatagctcggctgctagactggcgtcaaagaactgagagatcagtcggccagtggagagcgtttcgagcttcgccagctcgtcgtttgactccaagatgagctgagatagtttgcgcaagtatgcgccgcgcttgtcggtgcccaagtctcgccaggcggggaaagccgcattggcagcattaacggcgtcctctacatcttggatgtcggcttcttggactttggtaacagagtcggtgttagcagtatgttggcttttgcggagaaggggacacaccttgcgcaacaacctccttggttatggatataccacttcgaatgttttgccactagacgattttcgaaactagaaggttagtatgaagaagcatcattgtatatgaatagcagcctgcatagttacctcgccgttgatgaacagccgagtctcgatagattcgttcatcgtagatgccatagtggacagtgtgacagatttgacaataagtgaatcaagcataatcacgcatttagtcaggaaactaattcaacattgggcgatggttctgatttatatgcatgccagggagtccatcacctgcgccgacttcaagctttcaattggggctttcatttgaaacccaatcattagtcctcagtcccaaagccaaggacacctccgacattagttgtcatggatttcattgggcaatgtggttgaaatcgtacaaagtcatgtacaaatgacttgcatggatcaattgaaatggattatgttgactgctcagataccggtgtaacaatattagctgggcagtgaagtatcaagttatatgagcaactaaccgacctcggaccacttgagtccatgataagctcttgtcatggatgccttgatgagattcagtgactgggcagggtatctccgaggaccttctgagcccaccacaaagcttttcaatataacgttgtacctcggcagttacacgttagaatcatgcttgtatcactcagaatgtatacacttcttcactactcacaattggcaaaacagcattggaaatgcaaaagtcacgtggtatacctcggctcttccgtctggggaaccgagcgcggtcgatgagctacgccgggacccatttccccgtgctctcacgaatccccaaccagctccctcctatcatccacaaacacgtcatgatttcgcgatgagttcaacaaacttcgccgctgcacaagaacgagttcttcaacgtcgtcgccagcgtgaggcggaagcgcgcgtccgctatgcagcacagcagcgggcctctccgatcagcccggccaccgtccagcgtctgccatatccattgaatcgattacccggttcggggtggcggatatggaattccatcaagggccgggaaggcacgcgccccgcatttcgagtgggccaggtggacgctgaattgttggatgaggagttgcttgggctgctgaagggccaggtcggggatgctctcaaatacttcggggtatgtctgaatgaggctctggggtgttgtgagaaaaagtagctgacaccgacaatagcctcaaatgcgcgaagattggtcacatgagattctgttcgcgttacgggccatgctctttaaactatcaatatgggatcataacgcatcgtatggtgcggcactacaaggcctcaaatacaccgatagtcgaagcaaaggacccgttttctcttctccgacaaaatggcagaagggtatttatggcttattgacggttggagggcgatatgcttgggacaagtgggagagctggttggtcggacaagaaggtggctatgacgaggttagtgccgacacattgctctctattggcaatgctttactaacagatactacaaagccatcaccggacatccgaatgctgtcgcgactaacagacatgatctcgacatcgcactcgattgctgccttcgtctctttcctggtattcctagtgaatggccgataccgtaccttggtcgatcgcatccttcgaatccgccttactccaccgtctgcgcaggctagccgggaagtatcctttgagtatttaaaccgtcaactagtttggcatgcttttaccgaattccttcttttcctccttcctcttgttggaattggccgctggcggcgatggatatcccgggtctggaaaaagatggtcaattctgtccggtcaagcggcgatgacgacgagacccccgaaaaacaaggagagctggccttcctcccagagcgaacctgtgctatctgctactacgatcagaaccccaccacaacgaccgaaagcgataccatagccgcctctgcgtcagggggtattgtaggatcggcgcaaactgatatcacaaacccatatgagaccgtcccttgcggctgtatctattgtttcgtctgtattgtgcagaaactggaagcggaagaaggccagggatggtcttgcctccggtgtggtgaaattgtcaagaagtgccaaccttggaatggcgatgtgctagaagaggcacggtcgcagcctggaactgggaagattgttggctttgccattgacggtgaactgaatggcgagacccgtgggacagatcttcatcaagggggctcatcaaataagtctagcccattgcaagagatcagtgccgatgaagccctgcagcattcagagcaatggtccaccattgagaaagagacagaagatgatggcagaagaggtacgaacgaggatgagggcccaaaccctgctgcgatgtgacagtactcttaaggcacacgcctcacaccccgggtgctcttgggggtatgtaatggccttctcttctccgacttgtttataaatatacaattacctgggtagtcgcagcgcatatgcccttataaaatttaacgatacccatactcgaagaccgaagtttcctttcacataatcatacaagggattcatttaacaaatagcggagaatttcaatacggcacagcttcacaacttctggcattcccctttaaggaatcatccagctagagacagcagtatagaacccaatgccagctccaatgagtggaaacacagctctgatcaaattcaactgcgaccaatgctgcagaagttcaaccacctcgccatcctccctagcccgcttcgccttctcttgtggactaactaccatgccctcggtaccctcagcgtcagccgcatcatcgcgctttgcatgagccttcagcttggtatttgtctttctcataactgtaagagtaaaaggcgtaatgctcatcgtaaacccgatagcaagcatatagcacgtggaccagctggacccaaagatatccggcgcaggggtagcggagtcccgcaatgcccagagcgcatacaggtttgcaagtgaagataccgcggatataccggggaaaatcttgcttccacgagtatatatatcgagccactggtgtgtcaaatggccgggcgaggttcctggggtatcatggaatggcagggtcgcgctgggtgggcgacgggctggaattatgagattggggatgcttattatggataatgaagcaatgccgccttgtacactatgagtgtctggtcatctgttgcgtaggcagtgctacttacctgctcccactgcagagccaagcgtccctattgcctgggcaattctcacgtcggtggccattatacggctaatgttgtgctcaggaagtattgcaataagagagttcggtcaaaggagcagaatgctgcttttatgctgatagcatatgtatgacgtctacgaagggggaagtgacatgcctgattctcatggtatacctcaattaggcctcccttctatattatcttcaaccgcctttactattgacgctagatcatgaacagagagaatagatatctagtattgggtgaagatagaacatggggttagcttcattttgcctgcctatctaaatcagacatctaccctgaaaatcaggcatccaacttttggcccttcgcgttggtgccatggatgatgtggcgagttgcgacgatccctccattgtaaataaactagatatttcaacctgaaccattgatatacaaactcataatgccatatgtatacaacctcattagatccggagactaggcccaactccgatctgctcataaatcggccgcatctgactggacaacgaacgtggggtcctgggtgtcggacatcggtgcgaaaatcgagctcccgaggttgtctgggctataattctggtcaattgcatctccaatctctttctggtttcgttatcatatagctatcatatatcatcatggatccctcaaagtcaaccgtgcctagcactctcagtgaggctaaatacatcaactttccttctttgcccacagatgcgaagcatccggatggctcccccgcactcaatcgttactcccacactattaccaaaggccatgatttccccggcgcacgggtaggttggctataagaacactgcaggatctattactgaccgctataggctatgctctatgccgccggtgtcccagataaagaagcgatggcgaagagcccacatgtcggtatcgcctcagtatggtgggaaggaaacccatgcaacatgcatttgatggatttggccaagaccgtcaagaagtcagttctggaacaaggaatgcttgggtggcagtacaacacgattggtgtttcggatgcaattaccatgggcagtgaaggttggtttgatcctcaactctcatctctagcaaacgagatagctaacaccccgctaggaatgagattctctcttcagactcgagaaatcattgccgatagtgttgagactgtaacctgtgcccaatatcacgatgcctgcattgctatcccgggctgcgacaagaacatgcccggtgtcgtaatgggtatggcgcgccataaccggccctcaattatgatctacggtggaactattggaatcggctattctgagcacctgcggaaacccatcaatgtctcaacgtgcttcgaggctgctggtgcctacgcctatggtaccctgcgccaacccgacgatggtggtgaccaaaccaagtctcaggatgagatcatggatgacttagaacggcatgcttgccctggcgctggcgcctgcggtggtatgttcacggccaacactatggccactgctattgagtcaatgggtctgtcattacccggctcatcgtccacgcctgctgaatcgccatccaagatgcgcgagtgtgttcgtgccgcggatgctatcaaggtttgcttggagaagaatattcgaccacgggacctactaaccaagcggtcctttgaaaatgctctcgtaatgactatggcgctgggcggcagcactaacggtgttcttcacttcctggccatggctcggacagctggtgttaacttgaccctggatgacatccagcgggtcagcaacaagatcccctttattgccaacctctcacccagtggaaagtattatatggccgacttgtatgagatcggaggtgtcccatctgtccagaagctgttgatcgcggccggtctacttgatggagatatccccacagtgacgggcaagacgttggccgagaacgttgcctcattcccttctctgaccgagggccaggatctgattcgcccattggacaacccaatcaaggcgagcggtcacctgcagatcttacgtggtaaccttgcaccaggcggtgccgtcgccaagattaccggcaaggaagggctccggttcgttggcaaagcccgtgttttcgataaggagcaccggctcaacgacgccctgaatgagggccgcatcccgcgcggtgaaaaccttgtcttaatcgtgcgttatgagggccccaagggtgggcccggaatgccggaacaattgaaggccagtgccgcgctgatgggagcaaagttgaccaacgtggcgcttattactgacggccggtattcgggtgccagccacggtttcattgtcggccacattgtgcccgaagccgccgttgggggcccaattgcactcatccgcgatggagatgtcgtcaccatcgacgctgagaccaactcgctttcaatggatgtctcggatgaggagcttcaggagagacggcgtcagtggacccctccttcaccgcaaatcactcgcggtgtgttggccaagtatgcacgattggtcagtgatgcatcacagggagccatgacggatctgttctaatgaatcattatgatatgtcacctgagtgtaaatatagcatatttctaggctgttgaaatgatgttatgatctacgtgttctagaaaatttagaaaagggataaacacgacatgatcttcgtggcccgcttgaaattggccagtggtatgtaagaagccacgcatgctggctcgggaggtactataaaatggagtccaacacggagtagggagtagttaccaacatcttgggaaccaaagtgtacataatacattgtagggggcaatacgagagagcaagtggttatacatagaaaaagaagactaaattatactaagatctaacactaatgtacaaatcatctcgaatgttcaatttttcaaaaggtacttcttctcccatagtaattgccataatcaagcaagttccttccaaaacttgtggctgcaatacacaggttggaggggccaatggatgacgatgactcacccccacgccgctcctcccgaggctgtgagtggctgaagctgaaccctccgtgcattttcttatcctcgcaactcatttcaacgttgtcgacctagctatcctcattggtctctagcctacttgctctatatccaaagagcatcaggagcgccatcgcgtggttcttggcgagatcactatcggggggctctgaaagcgcccagcacgcccctccggtacttaatcatgggatccgacgctatctccgccctatatgactcgttaacgtctcaatctgaacctcgaagtgtcgcgactgttctgcgattctttcactcagtgcgcgctaccgcccaaaacgcttcattcgcctctatcgccaactatttccgcggcctctaccgcaatgaaaatgtgaattggggtcgggttgtgttcttgactacctgtgtgatcgctatgactggatgtgggttgttgtcgctggtgagacgcaagcggtcggggaagaaaagctctcgtgcgcaacgtcccgccgctcgcaagacgtcgaccaaatcctcgaagactctgagctcctcggaggaggaggattatgaagatgaagactacgacagtaatgcatcgctgcgacatggaaccaaccccaactataagacggaagattggtcgtctgacagtcagcagcaaagctctgatggtaggtgaatagctcatcttcaccgggggccttcattaacacttgcgcagcctacgaaacggacccgggcattctcaggaaattcaccacatataactcctacactacctcattcgccacttatcccgccattcgcaccttttacagcccgcatccacacctagctcgactcccgaccaaaccgactcctgttccactgatcgtggttgttcatgggctaggcgggtccctcgcacaattccaccacctcctaaccagtctgtctaatgttgcttcatgctttggtattgatttacccgggtgtggattgtccaagtttgcgcctacggattgggatgcatacaccgtggaggctctggctgaactgttagctgaagccattgatcagcacagggaccgtgcgtctggccaggaagtcattctagtgggacacagtcttgggtgttccttgtcagccctcttggcttcatcaacgtcgcccattggcgcaaaagtgaaagagcgtatcattgcccttgttgctatgtgccctcgagccgagcctccatctgcggaagacactgccaaatttcgccgactactttatgttcctggtccaattttcgatctttggcgccgctgggacagacgtggaggcgaacaaagtgcaagtgttatgcggatggtcggcatcgctgccgacgcggaaacacgaaatctccaggtgcgcttcaacaagcaaagtcggacgcctgtttggcgacgcatggcgtggggtacacttcccacctacgataatggtggccacccgattggcgggctccctggtcaacaggtctgggcggggattcgcatgccagttctattggtcgcgggagagacggatgctgtgaccaaaccggtggaggtgcagaagcttttgaaattctttggcgatgcttcagcccatattgcaattgacactagcgatagcagcatcatcccagacgcttcgcgagtccacgaccagatgtcacctccagtcggcgatctcgtcagtgggaaggcgtttggtgtgcaggtctccgaaaagcatttggacggtgcccagcggaagcgagtggtcaaatcagcgattttgccggcgcccgcatctcacgcactgctctacgaccgggcgacctatcgcactcttgcaggaattatccaggatttcctctcgtcaaatgtcgacaagcgtctcggtctgggctggcaattgcaacacatgaacacctctggaaagtgggatgtcaagaacctcgccaaatggaagaaggttgtcccagtctcggaacgaatcgccaacacatttgtcgcgctcaagatgttgcgcgaggttgacgaggaacacaatcctgtgactttcgcggcaaagtatcatggtcgcatacacgctgtcatagacatcagtcatgaaagtccagtctataacccagccgaactggaggcgggtgggattcgctattacaagcacccgactatatccaagattcctccgactccagacgagacgcgtgactttattgctctggtcaataacattgaaaaggatattgatgcgaagatggagcagcgtacggaggaagagaaggctctgccacgcccagtggtcggagttcactgccactatggctataaccgtacggggttcatgatcgcctgctatctgatcgagcatcttggttttggtgtacaagatgccattgacgagttcaaccggtgccgaccccctggtatccgacatggtcattttattgacactctatttgtgagatattgcgttggactgaagagagcgcccacgctgtaattgggaatgattcaggcattgaactgagacgaatactatggatcaaggcaacaggaatggttgttggaagttacgaataatgacaactgcgatgaaatagatttttagttggtgtataattagaacatgagaaattgagctcttcaaataatctttcatcacgaattgtatgtgtcttgtagttatgttgtatgtcatgtgaataattaatgtccggaaaatcaggcacgaaggtgtctgatttagagcccgatccgtcaggcacaaattgggctacatcacatgacccagcttagggtacggctaacccaaaatggacaagcgaacggcacacagacccaacccgcccagagttgtgtgtgtcttgaaattttgagcgactcttcgacttcgaccctgcccacctcgacgcccaacgcctctctctctctaatccctacccttcgacccctcgacaagtcgccaaaatgggtggtgttaccgttcgcgatgtggacgtaagtgtcctgctcgatttttaggtcaccagctctggtttgcatgatgtggacggttcgtttctggatgcacggatatcacaacatcggtcgggttatatcgccaggatggaaatagttcgggttgcgcacgcaataggcatatggtttcattgcttatagggaatatgtcgaaaattgagggatgtgcatgcatgttatgagcggcgaatatttgatagatccgtctatctgtcggtattcctcagggatacttgacacaacgactgcttactagcgaaaagctccccacgacgaatgatgaaatgcttccagaaacgaatccgacgcatctgcaaatccacagaacttgaccgatccacgcatatcttgagccacaactaacataacttttctcctccacacaggcgcagaagttcatctctgcctactctgctttcctgaagcgtcagggaaagctccccatccccggatgggttgacactgtcaagacctctgcttccaacgagctccctccccaggatgctgactggtacgactgcaccaaatatcaagccaacaaaattcgaacaaacaattgacattcttgctttcttaaaggttctacatccgcgctgccgcctgtgcccgtcacgtctacatgcgcaagaccgtcggtgtcggccgtcttcgcaaggcccacggttccaccaagaaccgtggctcccgccccgcccaccacgtcgatgcctccggctccgtcgaccgcaaggccctccaggctcttgagaagatcggtgtcctcgagatcgatgaggacaaaggtggccgccgcatcacccagagtggccagcgtgatttggaccgtatcgccaagaccaccgtcgatgaggaggaggagtcggatgaggaataaacgtatcgcaacgatgggcttttaatagttcggggataagtcgtttgtttttgtggttttgtcttcgctacggcggcaagatattggaaatgacggcacaaaaataaaaattcggagcttgcggtcccgtgcgcgactttacgtttgtttcttttttcttgttccactccatatttttttttctgacgaccagacggggctactagcggagagagatatgggcggtgcagagtgcatgaggatgaggcatcatatccggagacttgaacgagagaagagagcggacgagacgttctacacaatccttcccctctctctcttgttgagaggaggggatcttttttccccgacatgttttatgatctccctctcctctttgaccccgatcaaccctacggcgtctttgtcccttttttctctcgtggtctcctggaaataaagagcatgtctaaacactttaaaactgttccgtcctctctctctgttgtagatgtagatgtagacgtcttgtatcatttagccagcagatcttcagcattccatatctatggatcggttctcaaaagcccaatttatatccaaccattgctattggttttatgcaactctcgttcttacatatgtacaagacaagtcttaagttagctcgcattccaatctacttcatttctttcccgactgtgccgcggtatcctgaagacaatcaatcagcaccacatacaccaccttacagctagcacaaggatgtactcaccaaataaacctgataaaactgcatcttgatatcttcatcccccttctggggcgcgaacacaacccgtccagcccaaggcacataaacctcattatcagggttagccttgagtctatagttcacgccaccatacaacatgagctcattgtcaccaccgaagtagatctgcgtcggcgtgtgtcggcgtgaagcaacgtgtgtccaaagaccgtggcggagggtgagaattgctacaggattggtcttgttagccgggatacaacattgggcagatgtatattttgcatcgaagtggaaaccgggatcagaagctgtatagcttccccgatgttgagggcggggattggataacaccataccgcttgcacccttggcctccttgggtcccatgatgagtgtcgcatcttcggtgaagctctggacatatttctcgtgcagggactcggtgtcgctagtgcggtagaagtcttccatgaatgcgacgaacgcggcgccgcggggtggtgcccgggcagtgtcgtaggcgatttggtaagacattatggatttgtcagttagggagaaatatttgcaagttgagaagaataatgagagatcccgcagaatatgtctattctatcatgaggggaaagtatcggaagggacgcatcctgtggcaagtaagcttggtggggaagatgatgatattatgaaccccttgttgggggtgctaactagctaactatgactaagctgtgacaatatgccgggtctcaaaaaatctcggcctccggctgagaaaaaaaggaaatttcaataaaaaataagaataaaaaatgataagaaaacgaaaaacgccgtcagttgtcgcaggcccggggcggagtatagatgtccgagggcgtgaattcacgcccggggtcgtacggtggcccctcggtggccacttcgagaggagcttcgcagtggttgccacgttctttatcgcctagtagtaacgggctctctagttgggcttggttgttaggagcagcgctttattaaagttggcaggggcggtggaacaggttttcccagcgtctgatggctcggcgctgaatatccgggaaactgctgagcgtgttcgagattgtcataagggtgccagcggcaacggcttcggtcttctcggtcagagcggcctcttggagttacagctggcgatatctagccatgtgttcgcgtaacctttttaaatcctcgatctctggctgtacccggtccatatgctccattatgcctttatagggaaggatgaaatcgcggaggatcttttcctcggtatcagctcggcacagttggctttgcacggctggcaattggctctgaggttcaggaatgtccggtgaagagaacggagcggaagagctgacgctgatcgcgtcgccaggttggtcctgcgtggtgggctggcattcttgctgagtaccgtgactagaccaagttggacgatttgtattctggtatgagcgttgaactgggtccatgatcttcatctttttcaggtccattcgggagaaagtaaaagacagcacttcagccgagcatgaaggagaccacgtggagaattcccagaaaaaaccataggagggtcttagtccttgtaggagcatagcgacgtggtggtgattgtctgagccgatgtccagcatctttgagttcgtttcagctttccagagcgtggtatactgaccgtggtggttatgcaattggcgtaccacagaacgggggtacggaaattcggcttgttcttcagcgtggcgggcttggaataccgctgctgggtcagtaactgcatcctctgcgaaaggataacctaggacgataggtccgattgtgaaaaccgggttttcgattttaagctttgaatctgccttcgggaccatcaggtagccgtattttgcggctgcacgaaggccaacgaacgcatagtaacgtttccagattggcgcgcatgggagaccatggaagtcgattcgtgggccggggtcctgtggtatcctgctagcacgtggttcaccgttggcgtcccagacggcacggaactcggcgcgcttcttctgagacagttccttcatcgctgcgtaaacaagctcgtcgcttagcagaacgttgcggtcgtcaggtagcaccagccttccttttgggtcgcgctcgtatctcacgtataagggcaaccgagcgatgtcttgtggagatagtctactgcctgtgataactgggacccagtcactggtccagattggcctatccagttccagttcagtgcgagcggcatcacgagattgtgtcatgcaggaatcgtcgaacgcgcatcccggaaggcaaagcatatcagtcgctccctgcgacggaccaaggcacgggagtgcctttcttttcggcataatgagtctggtgtgtaagaaagagaatggttaatgtgaaaaaagaagcaatggaggtaggaaaaatggaacaggtacgtcgagcagcaagtaacagtcgaatgagagtcagaaactcaaatcggagtaaaagtaggagtcggaagtaagagtcaagtgacgtgaggtagtgagaatggatagtaataaaagtaaaaggaaagtaaaaataaagcgaggaaaacgtggtacttaggagctcgccgggggtacgccctgacgctcctcgaagtctttgatagcctcgtcacatccgatgcagtcctcttcccgcacccaacagtcgtccctagctgattggcctttccagcggatcagatacttagtgatttgacgcctagtaccgtcgtgacggggtcgaccaggcgcgttgacgacgcgcttggcaagaatgcggtcgacctcgtagacgatatcttcggggaaacgctcgtctgtagtcgggtggtgttcgtcatctggttggcgctcccaggggtcgtcaccgtccggggcgggttctaggtgtgcgacactgatgactgggtggattcttgactcagttggaatattcaaacgataagcaagcttcccgacgcgttcgagtacttcgaaacgcccgacgtaacgctgtcgtagtcgccttggtaaaacttggttcaacggtgtgtcgtatccgtgtcccagcttaagatagactttgtcaccgacattgaaaaaaatctgcctgtgatagcggtcgtattggcgtttcatacgcatggcagcccaagcggcagaatgctcggcatctgcacgcgcggcgatgtcgggagctgtggcttggcgtaaaagcgaccaagggtggcgtagttcgacaccgtataagagtttgtgaggtgagtgacctgtcgttacgctgactgagctgtttagcgcagcttggagggcgggtaataggtttggccaatcttcgtcggggtgagtggcgattgcgtgccgtacagcaacttcggctgtctggttagtacgttccgactgaccgtcagtttgtgggtgataggcggtagtaaaaaacaacttggtgtagatgaggtcgaaaagtgctttccagaggccctgcgtgaacttggggtcgcgatcgctgataatcactgtaggaatcccccaattggctgtccaccagaaagagagagcacccagcgcccaatcttcaccgtcccagtctgcgcagccaggtatcattcccatcaacttggtgaacttgtcggtcatagtcatggccgcgtcatatccgtcggtcgaaatgggcatcgcgacgattagatctaaagtgatagtgtgaaagggtatcggcagggcgatgatcggttggagagaaccgtacgggcgatgacggcggatcctgtgctccaaacagatagggcaatgttcaatgtactgctttaggagcttggcgcctttgtagaatgtgataccgcgaagcttatgccaagctctgtcgaaaccctggtgcatctgctcgtcatgaaccaagttgaaaatttcctgagtcatggatcggggcagacacagactctcctcgccgttagaatttgtgaaaatgatcaagccattctccaggtggtagggtaacttctcaacttggggatcctgctgggcgtcaacgctttctagagtgtcgatcagggctgaccagcgagtgtctgactggtatcctcgcaagatgcgatccttagtgtcgtcgcttagctggagcaccgatgctgtaaggaggtacgctgtgggttggtctgctgtaggttgtttaaatannnnnnnnnnnnnnnnnnnnnnnnnnnnnnnnnnnnnnnnnnnnnnnnnnnnnnnnnnnnnnnnnnnnnnnnnnnnnnnnnnnnnnnnnnnnnnnnnnnnnnnnnnnnnnnnnnnnnnnnnnnnnnnnnnnnnnnnnnnnnnnnnnnnnnnnnnnnnnnnnnnnnnnnnnnnnnnnnnnnnnnnnnnnnnnnnnnnnnnnnnnnnnnnnnnnnnnnnnnnnnnnnnnnnnnnnnnnnnnnnnnnnnnnnnnnnnnnnnnnnnnnnnnnnnnnnnnnnnnnnnnnnnnnnnnnnnnnnnnnnnnnnnnnnnnnnnnnnnnnnnnnnnnnnnnnnnnnnnnnnnnnnnnnnnnnnnnnnnnnnnnnnnnnnnnnnnnnnnnnnnnnnnnnnnnnnnnnnnnnnnnnnnnnnnnnnnnnnnnnnnnnnnnnnnnnnnnnnnnnnnnnnnnnnnnnnnnnnnnnnnnnnnnnnnnnnnnnnnnnnnnnnnnnnnnnnnnnnnnnnnnnnnnnnnnnnnnnnnnnnnnnnnnnnnnnnnnnnnnnnnnnnnnnnnnnnnnnnnnnnnnnnnnnnnnnnnnnnnnnnnnnnnnnnnnnnnnnnnnnnnnnnnnnnnnnnnnnnnnnnnnnnnnnnnnnnnnnnnnnnnnnnnnnnnnnnnnnnnnnnnnnnnnnnnnnnnnnnnnnnnnnnnnnnnnnnnnnnnnnnnnnnnnnnnnnnnnnnnnnnnnnnnnnnnnnnnnnnnnnnnnnnnnnnnnnnnnnnnnnnnnnnnnnnnnnnnnnnnnnnnnnnnnnnnnnnnnnnnnnnnnnnnnnnnnnnnnnnnnnnnnnnnnnnnnnnnnnnnnnnnnnnnnnnnnnnnnnnnnnnnnnnnnnnnnnnnnnnnnnnnnnnnnnnnnnnnnnnnnnnnnnnnnnnnnnnnnnnnnnnnnnnnnnnnnnnnnnnnnnnnnnnnnnnnnnnnnnnnnnnnnnnnnnnnnnnnnnnnnnnnnnnnnnnnnnnnnnnnnnnnnnnnnnnnnnnnnnnnnnnnnnnnnnnnnnnnnnnnnnnnnnnnnnnnnnnnnnnnnnnnnnnnnnnnnnnnnnnnnnnnnnnnnnnnnnnnnnnnnnnnnnnnnnnnnnnnnnnnnnnnnnnnnnnnnnnnnnnnnnnnnnnnnnnnnnnnnnnnnnnnnnnnnnnnnnnnnnnnnnnnnnnnnnnnnnnnnnnnnnnnnnnnnnnnnnnnnnnnnnnnnnnnnnnnnnnnnnnnnnnnnnnnnnnnnnnnnnnnnnnnnnnnnnnnnnnnnnnnnnnnnnnnnnnnnnnnnnnnnnnnnnnnnnnnnnnnnnnnnnnnnnnnnnnnnnnnnnnnnnnnnnnnnnnnnnnnnnnnnnnnnnnnnnnnnnnnnnnnnnnnnnnnnnnnnnnnnnnnnnnnnnnnnnnnnnnnnnnnnnnnnnnnnnnnnnnnnnnnnnnnnnnnnnnnnnnnnnnnnnnnnnnnnnnnnnnnnnnnnnnnnnnnnnnnnnnnnnnnnnnnnnnnnnnnnnnnnnnnnnnnnnnnnnnnnnnnnnnnnnnnnnnnnnnnnnnnnnnnnnnnnnnnnnnnnnnnnnnnnnnnnnnnnnnnnnnnnnnnnnnnnnnnnnnnnnnnnnnnnnnnnnnnnnnnnnnnnnnnnnnnnnnnnnnnnnnnnnnnnnnnnnnnnnnnnnnnnnnnnnnnnnnnnnnnnnnnnnnnnnnnnnnnnnnnnnnnnnnnnnnnnnnnnnnnnnnnnnnnnnnnnnnnnnnnnnnnnnnnnnnnnnnnnnnnnnnnnnnnnnnnnnnnnnnnnnnnnnnnnnnnnnnnnnnnnnnnnnnnnnnnnnnnnnnnnnnnnnnnnnnnnnnnnnnnnnnnnnnnnnnnnnnnnnnnnnnnnnnnnnnnnnnnnnnnnnnnnnnnnnnnnnnnnnnnnnnnnnnnnnnnnnnnnnnnnnnnnnnnnnnnnnnnnnnnnnnnnnnnnnnnnnnnnnnnnnnnnnnnnnnnnnnnnnnnnnnnnnnnnnnnnnnnnnnnnnnnnnnnnnnnnnnnnnnnnnnnnnnnnnnnnnnnnnnnnnnnnnnnnnnnnnnnnnnnnnnnnnnnnnnnnnnnnnnnnnnnnnnnnnnnnnnnnnnnnnnnnnnnnnnnnnnnnnnnnnnnnnnnnnnnnnnnnnnnnnnnnnnnnnnnnnnnnnnnnnnnnnnnnnnnnnnnnnnnnnnnnnnnnnnnnnnnnnnnnnnnnnnnnnnnnnnnnnnnnnnnnnnnnnnnnnnnnnnnnnnnnnnnnnnnnnnnnnnnnnnnnnnnnnnnnnnnnnnnnnnnnnnnnnnnnnnnnnnnnnnnnnnnnnnnnnnnnnnnnnnnnnnnnnnnnnnnnnnnnnnnnnnnnnnnnnnnnnnnnnnnnnnnnnnnnnnnnnnnnnnnnnnnnnnnnnnnnnnnnnnnnnnnnnnnnnnnnnnnnnnnnnnnnnnnnnnnnnnnnnnnnnnnnnnnnnnnnnnnnnnnnnnnnnnnnnnnnnnnnnnnnnnnnnnnnnnnnnnnnnnnnnnnnnnnnnnnnnnnnnnnnnnnnnnnnnnnnnnnnnnnnnnnnnnnnnnnnnnnnnnnnnnnnnnnnnnnnnnnnnnnnnnnnnnnnnnnnnnnnnnnnnnnnnnnnnnnnnnnnnnnnnnnnnnnnnnnnnnnnnnnnnnnnnnnnnnnnnnnnnnnnnnnnnnnnnnnnnnnnnnnnnnnnnnnnnnnnnnnnnnnnnnnnnnnnnnnnnnnnnnnnnnnnnnnnnnnnnnnnnnnnnnnnnnnnnnnnnnnnnnnnnnnnnnnnnnnnnnnnnnnnnnnnnnnnnnnnnnnnnnnnnnnnnnnnnnnnnnnnnnnnnnnnnnnnnnnnnnnnnnnnnnnnnnnnnnnnnnnnnnnnnnnnnnnnnnnnnnnnnnnnnnnnnnnnnnnnnnnnnnnnnnnnnnnnnnnnnnnnnnnnnnnnnnnnnnnnnnnnnnnnnnnnnnnnnnnnnnnnnnnnnnnnnnnnnnnnnnnnnnnnnnnnnnnnnnnnnnnnnnnnnnnnnnnnnnnnnnnnnnnnnnnnnnnnnnnnnnnnnnnnnnnnnnnnnnnnnnnnnnnnnnnnnnnnnnnnnnnnnnnnnnnnnnnnnnnnnnnnnnnnnnnnnnnnnnnnnnnnnnnnnnnnnnnnnnnnnnnnnnnnnnnnnnnnnnnnnnnnnnnnnnnnnnnnnnnnnnnnnnnnnnnnnnnnnnnnnnnnnnnnnnnnnnnnnnnnnnnnnnnnnnnnnnnnnnnnnnnnnnnnnnnnnnnnnnnnnnnnnnnnnnnnnnnnnnnnnnnnnnnnnnnnnnnnnnnnnnnnnnnnnnnnnnnnnnnnnnnnnnnnnnnnnnnnnnnnnnnnnnnnnnnnnnnnnnnnnnnnnnnnnnnnnnnnnnnnnnnnnnnnnnnnnnnnnnnnnnnnnnnnnnnnnnnnnnnnnnnnnnnnnnnnnnnnnnnnnnnnnnnnnnnnnnnnnnnnnnnnnnnnnnnnnnnnnnnnnnnnnnnnnnnnnnnnnnnnnnnnnnnnnnnnnnnnnnnnnnnnnnnnnnnnnnnnnnnnnnnnnnnnnnnnnnnnnnnnnnnnnnnnnnnnnnnnnnnnnnnnnnnnnnnnnnnnnnnnnnnnnnnnnnnnnnnnnnnnnnnnnnnnnnnnnnnnnnnnnnnnnnnnnnnnnnnnnnnnnnnnnnnnnnnnnnnnnnnnnnnnnnnnnnnnnnnnnnnnnnnnnnnnnnnnnnnnnnnnnnnnnnnnnnnnnnnnnnnnnnnnnnnnnnnnnnnnnnnnnnnnnnnnnnnnnnnnnnnnnnnnnnnnnnnnnnnnnnnnnnnnnnnnnnnnnnnnnnnnnnnnnnnnnnnnnnnnnnnnnnnnnnnnnnnnnnnnnnnnnnnnnnnnnnnnnnnnnnnnnnnnnnnnnnnnnnnnnnnnnnnnnnnnnnnnnnnnnnnnnnnnnnnnnnnnnnnnnnnnnnnnnnnnnnnnnnnnnnnnnnnnnnnnnnnnnnnnnnnnnnnnnnnnnnnnnnnnnnnnnnnnnnnnnnnnnnnnnnnnnnnnnnnnnnnnnnnnnnnnnnnnnnnnnnnnnnnnnnnnnnnnnnnnnnnnnnnnnnnnnnnnnnnnnnnnnnnnnnnnnnnnnnnnnnnnnnnnnnnnnnnnnnnnnnnnnnnnnnnnnnnnnnnnnnnnnnnnnnnnnnnnnnnnnnnnnnnnnnnnnnnnnnnnnnnnnnnnnnnnnnnnnnnnnnnnnnnnnnnnnnnnnnnnnnnnnnnnnnnnnnnnnnnnnnnnnnnnnnnnnnnnnnnnnnnnnnnnnnnnnnnnnnnnnnnnnnnnnnnnnnnnnnnnnnnnnnnnnnnnnnnnnnnnnnnnnnnnnnnnnnnnnnnnnnnnnnnnnnnnnnnnnnnnnnnnnnnnnnnnnnnnnnnnnnnnnnnnnnnnnnnnnnnnnnnnnnnnnnnnnnnnnnnnnnnnnnnnnnnnnnnnnnnnnnnnnnnnnnnnnnnnnnnnnnnnnnnnnnnnnnnnnnnnnnnnnnnnnnnnnnnnnnnnnnnnnnnnnnnnnnnnnnnnnnnnnnnnnnnnnnnnnnnnnnnnnnnnnnnnnnnnnnnnnnnnnnnnnnnnnnnnnnnnnnnnnnnnnnnnnnnnnnnnnnnnnnnnnnnnnnnnnnnnnnnnnnnnnnnnnnnnnnnnnnnnnnnnnnnnnnnnnnnnnnnnnnnnnnnnnnnnnnnnnnnnnnnnnnnnnnnnnnnnnnnnnnnnnnnnnnnnnnnnnnnnnnnnnnnnnnnnnnnnnnnnnnnnnnnnnnnnnnnnnnnnnnnnnnnnnnnnnnnnnnnnnnnnnnnnnnnnnnnnnnnnnnnnnnnnnnnnnnnnnnnnnnnnnnnnnnnnnnnnnnnnnnnnnnnnnnnnnnnnnnnnnnnnnnnnnnnnnnnnnnnnnnnnnnnnnnnnnnnnnnnnnnnnnnnnnnnnnnnnnnnnnnnnnnnnnnnnnnnnnnnnnnnnnnnnnnnnnnnnnnnnnnnnnnnnnnnnnnnnnnnnnnnnnnnnnnnnnnnnnnnnnnnnnnnnnnnnnnnnnnnnnnnnnnnnnnnnnnnnnnnnnnnnnnnnnnnnnnnnnnnnnnnnnnnnnnnnnnnnnnnnngatcctgtactctaaatagatagggcaatgttcaatgtactgctttaggagcttggcgcctttgtagaatgtgataccgcgaagcttatgccaagctctgtcgaaaccctggtgcatctgctcgtcatgaaccaagttgaaaatttcctgagtcatggatcggggcagacacagactctcctcgccgttagaatttgtgaaaatgatcaagccattctccaggtggtagggtaacttcttaacttggggatcctgctgggcgtcaacgctttctagagtgtcgattagggctgaccagcgagtgtctgactggtatcctcgtaagatgcgatccttagtgtcgtcgcttagctggagcaccgatgctgtaaggaggtacgctgtgggttggtctgctgtaggttgttcaaacacatacggcgctgggatatcctcgagatcgtcttgcgtgccggggactgacgggtccgtacatggcaggcgggaaagagcgtcagcgatcttattagtttttcctggtctatggaagacgcgtaggcgaaactgttggatgaactgggacgcacggactaggcgaagattttggcgttctaaagaaatagaactcaagtttgtcgctttagcaatacccacagtgctactatggtcggtgtataccacagccggaaggtcgctaggacaggcctctaccaagtggcgcaccttgcggagggtccagcagagggcggaaacctcgagctcagtgggccagtaattcttctccgcgtctgtaagaagtcggctgaggaacatgatcggctggatctctgtagcagggggtggttttgaaacgtccttatgagtgaacgtcgtcttcgtatgatagattgtggcaccgtgccctgtttcctttgaaccgtcggtatcgatgtagagctggcgtgtgggatcatggtgtgctagccatttaggttcgtggaactcggcctggagtagacgaaaactctcgagctcagcttgggagggttcattgagaatggcttgcgcgctccacgctcggcgctgggggcctttgatcgggctccctttcagcaagtttgtcttgcggacttggagtggttccgatttctgtgcgtagcttttgatataatggcgaagatcacccgtcattccaaggtatgtttccagctgcttacatgtgcgcggaaaaaccagtgaggttatcgcctttaccttctcggcggttgttgacatgcctgcggagtcaatgtccttgcctagcagggtcaaacttggaaacccaatacgcgctttcttcgggtccagagtgatattgaattcctccagttttgcgaacagtaggtggagtttagcaacatgctcgtcaagcgtatcgccgaccgcgaagatatcatcgacgtaggttcgacaccattctcgaaacgcgcggagtatattgtccatctggcgttgtacgtaggcgatggagtttgaattgcccatggcaacgacgtggagaacttcttgaccgcggtgcgatatgacagcttggtggccataatagtcggggtggatgcgccattgatagaagaattttgccgcgtccacgattgtgatgaaacgcttgccttttgccaaagcaataatctcgtcttgtcctggcaatgggtataggtctggaaccaagttcttatttgtcgggcggttgtcgaccacggcgcgaccgacccgttggagcttggcgttacccttgtcgtctgtgcgagtgacccatttccatacaacaaaaacagggttcacgccctgggcttggtgtttagcaaacgacatctttccttgagcatgtagagcatcgaatgcatcgtcgatgacttgttggctttctctcgcctgtctgtagacttgtgaacgctgtggctttgaaccagggactgttgggagtctcatccattcgtcttgtgggatgtccacaacgccggggttagaccaaatgttgtattgctcacaaacatcgcggagcactgcagctgtttcaggcgtcccatagattataatgccattaggtagtactgtttccagtggatgtcccggccgagcgtaggctgtagatgttggcaggaccttctgcatgtccggtgtgaaaacagtatcaggaagtctatcaggaagtctatctggcagccggggcaagttgtcaacagcggccagataggcagtgacagagtcgtgaacgtctcgattaatcaatggggggcggggctcgaccgcttggggctgcgatgccagaggcgtcacttcgggagaaacttcttggggctgcgatgccagaggcgtcacttcggtagaaacttggtaggcggatgtgaagtccggctctaaaagttggcctacacgatccttcttcctgatgacttgtgttcggtcggtgttgttaacggcgtgtatatatgcgaaaccggcgtcaaccatctgtgccggaatctcaaacttgctgttgcctggctcgaaaacgaagtcacgatccttcggtaaaatcgacttcacgacaatggggatccgtgccgcctggcgtggggggacctcgattttagaagaagcgtagaccggtcttttactcacgtggtgtggttttgcgcagagggcaataggaaaagtcaagttttcgcaggactcaatgatcgcctgggaacgcgggaaatcgagtataaacccttctggtcctagaacatccatgccgataagaagctgggcacggaggtcctcgacgacgtgggcctcgattcgtagctctgcggccgtatctttgttcaggaagtaaacttgaatcacgatgtagcggtcggacaggtgttgggaaccgatcccactcacaggaatcgggctgatagggtactgggggcattggagtgatgccgccagctttgaatcgatcaaagtcataacacatccggagtcgaggcagcaagtgtttagcttgctggggcttccaagtccgactgtggccgttgtatatcgccaggatcgaaatgtatagccggggacgtggtcggtctgtctggccgagtggatgatgcgatgagcgggattcgcgaaattagcgacagcttcagctggtatagcggcagcagcttgaggcttacagccgtcaagatgctgatacagcttggtgttcgacttgaaaacctgtaaacaggataaacaagtgactgagtactcgctgtcgactgtacatagctgggcctgtgccggcggatcggcctgggctcgaaaaccggattggtggtcgtcgtcccgtaggccggcagggtcagcgaaattcgcaccgtacgggtcctcgtcggcgtaaaagtcgtcctcgaaatcctgttgatcgtcgtcgttgactgggacgtcgtcctgatactcctccaggccattgtcattagcttgggagtagtcattcgactgatgatagtcagtatctgtatccacgtggtatgcccgctgaggtttgttccaaacagcacgctgggagttcccggagccgttgcggccggaccattggcggccaggattgttccaggtctgctgagcttgaactccctgctgtggacgttgttgtctctgaaaggtttgggggccttggttgctttgtgctgggttctggggctgatactgatgggactgatattgggctcctgtggcttggtatgggcgctgaggagtctgctgagcctggccacggggcgctggagcctgttgttgtctatatccggcctggctttggggtagaccttgatagtcttgggctggcgagcggttgtagccgtacgggcgctgagggtagccttggcgctggtcttgtcggtgatatggggccgaattgtcctgtcgcggcctattgtttctaaacctggtagtcaactgactctggcgcttggttgccatatctttccagtcttgatagtggtggtcaaggctgttcatgaaagtgactaacgaggtagtctcagttggctctgggatgtcgcgacgaagcgtaggctctaggttctggcgaattcgtaataactggtcgagaacatctgtcgtacccgtagctttgcataggcgtaacataccctgcgcatattctcttggggtgcggcctcggcgtacgtcatcccattcgtatgtgtgcttgtcaagctggagaagggcctcggtacggttgggtctgaaacgccgcgtcatcatggaaaaccatccatcctggagcggaacctggttcataaggcgtttttcgtccgtggtcagctcctgcgaataccatcggagcgcgtcacctcgtaggcagctatggatgttcgctcggacaacagcttccgacttcaggagtattaggtctgtcatacgatctacaaacgtatgcacgtcggagtagacgcaaagattttggactgtgtccattccatccttaaaactcttcgaaggatcgaaaacgccaatttcggacgctttccacgaggtatcggtagtagccaattggcctggggaaccttgctcgccctggggaccttggttaccttgaggcccgcgaagagcgttggcattgttccgaaggcttgtctgtacggctttctcgataagctccgtaaactgtgccatatcgaaaccgggcaacggtggggaagcagccggagttggcgtgtcgcctgtgtggccgggaccctgatttccgttgttacggctgggacccggacctccgttatttgccatttttcgcgggaggtcagagagtttggcttcccgcagcaggctcgatagacctgctatggggctggcctcgctgtcgtaaaaacgtgaagttaatcgtactcttgactgtaccgggggtcgttccggggtcaggtgttcaatgccggcctcgtgagagtggaggtccgcttggtcgtcttcggcttgttcggttcccggagactggacttccgcctggtcgtcttccgcttgttggtcttccggagactggacttccgcttggtcgacttcggcttgttgagactggacttccgcttggttgacttcggcttgttggtcttccgaagactggacttccgcttggtcgccccgtagaaggtctgcgtggctgtccttagcctgtggtgcggaattttcgtcctcggttcggaaaaacttgctgtcgtaactgtctggccggggactgaaacgaggctgccgtcgtgtagtagcgggcctgtgcgcgtagcgtatgacagcagtagcttgggcagtcggtcggtccgaaatgggcgtcgaagactggggtgtggaaaggtgtatcacagcagcaggttgggcagtcggttggtccgatacagacgtcgaagattgaggtatggaagccggtgaactgggaggcttgctcgtagttcgcttaggtcggggtctcccgagcggacacgcaggctcgctcgacagaggggttataggacttggaacggcgaggtgagacgtcagacggaggaaatccttgacggccttgttgagtatagacctgtcgatgggccaggaaggtggaaatggatcctctgaagatggaaggatgacggaagtggatggcgaggttgagggattggcgggcccggcaggtgaaggggtcaggatgatgataacgcgggaaagtgtatctgcgtcgaaatcacctgactaggggcgtgcctcctagcgataattgtcgaactggattgcaagctgggtggcccgacgagtacgcttatccatggattgttatagtagcggctcggcactgtgatcgacagccttaccgtagcggcttggcactgtgatcgacagccttaccgtagcggcttggcactgtgatcgacagcgtggtcgaccgccgatcgtgccaggcttggtgacctctgaccttggcatataggggaacccctgaggtggtcgaacttgttaaaacaaacccgagagagatcctctcggaagaaaaaaaactctggatgaaaccaggacgtgctaccataaatgtggcaagtaagcttggtggggaagatgatgatattatgaaccccttgttgggggtgctaactagctaactatgactaagctgtgacacatccgatcttatcgaggaccgtataaagcgaagtttttctttctacttttttgtatggcctgatgagcataatattagacttacaacaaggcagatactgatacatgtgacgtcctgctggatctgaaaaactacatggcctgtatagtcctcgactcgtacgttgtacttcggaatagcatcggaagtggacatacccacaaatattagtcctgacagtcacctatttagggatttatatactttattttctaagttcaaaggagtccttgtcacatgggttcgatataccttattgtgtacaaaataaatgtcccttcaatacgaagtataatttgaccattttgcctgatatatattggttttctttttaaataatcttttgcaacatttgtatttgaagtttagaaaagaacccattcggaatcattgctagctgcattgggttgcaaagcagttttacattcgtagcgtcattgacaaacacatggctcatggtaatattgacaatctcgacagctttgtcgatgatgggctatgtatcaagctttcatcgttcctgttgagctcttgtgtgcatggaaaagaggagaaaagagatctgtcaatagcatagatgtttttagaggatgcctttacagttggcttatagttttcaccggtgccttcctgctcacatgtgttttgttcatcctgtcctcgttgatttattcctcgattatcattgtcataaacaatagtcttcttctctgtcctttatatgagacttctcaggcataatagtctactcctttgtctgggcaaagatatctttgaaccctttcaatttctgaggaccaaggatccgcttgccagagacttcgtagttccattgcaaaccgttggtcataaacctttacacatttccctcaatgtctagatcagaaaggtcagcatcaaacgaaatgaccatcagatataatatattccagggttcaaagtctctaacgattgtgatttggactaggcgaccctctagctccagtgtgctcttcttgccggccacatatgatatgagcatctaaaatgtcagactaaatcaaaatcaagaagctgcaaactgaccacctcagttagcctattcatatcagttctcagaggaataccgtgccaactatctaatgacgtctccctccaggataacaaaggattcttgaaatcaagggctgtacactgagtatctctcatgctaggtttctttgtcattccgaggggtagcactgaaacactgaaaggaaaagaagccgaaggaatccagaagtcatcgatccccttggaagtatcagcactatcagctttatagattgagaattcaacttcaaattagagtatgttatccatactgtttctcacaatgaaacttctacctgatagtatatactcttttaattgccaagtgaagttatcatcttagggaaagaacacaaaattttacgtgcatagtctgcttaggggcgataaaactatattttgtttgttatagagatgacaagccactacacccgaggttgaaggtgagccttgagaaagattatagtcaaacttgtgaccttagggtgaagatcccctaatcatccgatcataggattttaaccacatcttcttcaatgtagatcactaggaaatcaagcttgtgtgtaaaaccaaaacaatgtgtacatggcggtgaaaacatctggaatcccccgcctaccaaggttctaagacccagtgtatacaacgacatctcacggatagcacccaagatttcgattctccatactagcacagtcatggccgactcaacgagatcaaaagacagtttaccacctcctccacctccgcctcccccagagaaccctcgctcaaaaatatcccccacagtcctaaagatgcgaagcacatctcccagccacttctttcagccccaagtccgccgatctcaaaaccaagggcctgctccaacaggcccatacttcttctacggctcactccatgaccaaaatctactcatagagctgttagacctaagccacgccccccacctacgacccgcgtacatccagggctacaagcgtaagctttggggacactacccagccttgctctctggtgatcccatggatactgtcacgggagcagtgtacgaggtacttagagttgatgacgcgaagaaactagcggcttacgaggggcctagctacacgactgttgcttgctcaatccggtatgcggatggcgaatctccaatacaggcagaggggtatgcgtttctctttgtggggaatacgcgtgatttaagtgagggatcttttgatttcaagctttggttagagaggagggcattgggaaggaagagctgaggaagatagtggcgcggggtgggctcatacttcggagtccgaaacgggaagttatagactgtacgataatacagcgagtcaaaaaacatcagtttctctgcttatctatgttagtctgagtcagatggactggatattgtactgttgtaagcaacaatcccaaggaagcatgaccaaaatagagtatgtgcagaatcaagttgatgaacatcgcggggtaaacagggtaagcgacagagaccgaccaaggcacagacaactcggagaccaacagaggggcaagtagaagtagaatcctcggctgcagcacgattgaggggtaacaatcgtacagaatggtagaatgatatagaaggtgacatgcagggctaagtcgtcacccgcatctacttcccgcacaataggggggaaccttggaagggaattgatgtccgaatcgagaacacccgcaatgcctaacacacagaccctgataaacaagtcaacaagaggacaagcgcacaggtggcttgtatgtcgtacatggacctcgcactaggtgcattcctcgggtgtattcacacggcaacaggggctacttccaaggcaggtgtcaactatgcaggatttgcattctaagatgacgatgcgaatgtggacagcatagtttggagtctagtttcaattaggtacaatatatacatgctccttagcatacaacaagtatatacggagtatggagtacggagtataggaataatagaaagccaaattccaagaatgtcaccgataccagtgacgtcaagggaccagcccagattatagtgggacccgagggagagtggatgtaccggtacctagtacacacatatcatactcgatgttggatgctgccgggttcagctgactgacgcgggggcaaatggagattaggaggtcacagccatgcgaataagaatgacatgtacatcatgagttccaaggaccgtgggaaggattgaggtcgatgatccacgtgccctgaatgacggttatcagccgatgatagggaaaactagggttacgccctggagcgctgcaagcgttcattaaaagcgcacgagcactcaggatcaccatgactggccgataacgacttggcatgaggggtttatttcgttattactcaggtatcttaggggggtacggggtaagggaagtatttccttgtatgaataagaatgacatggagagatggtgtatgaggtattcatcttaagatagagactagagtaatgtataaataggtgtaatagtgatagttaatagctaattgttaagttaatactttaatagtactccgtataactactcctatactcctataatagggagagccggatgcacccggtgtcccacgaggcgccaatcaattcacccacgcgctttcccaatttcatactgggggggttaagtacaaaggtccaagtcactggccaagtcacactttcaacttatatttccccttcctcgactactcccccccctgttggactggacaactcttcgaccttttcttggaatccgctcttatcgcgactatctgtctccccttgccgcgcatcccctacgtggatccaagccctaaacaaagttggccccaacttcgctacacggctacacggctacagtgtctccttggtcgcggtgtgaaaggtgagttcctttgttttgacttcttgggctctttcactctgaaaccatcctgttgccacctgatctttccatggtacctttgtttgagaccgtcttctgactcatatactctggctcgcgcgctttaggttcttctcctttcacaaatccatcttctcttcatcatggctttccagacaaactccagcattgcaatggctcttgctggcaagactgcctccgttgatatccctcagcgccgctctggtctgagtggcggccgtgtccctacgcgtcccggacagcctgcgatgctgcccacgccacctaactctatatccccgaccctccctcctcagaccttcaagcaccgcgcgacactgtcgccaggatcgccgctggccaccgtcccccagttggactccgatatcgatctggaggatgcggaacatgacaacagtcatcacgtctccctgcctgtcgaggacctcgacagtactggcgcgatcacccctgtcatgcttgcgaagtatcatctccctgagatcttgctgcaccaggggcccttggctatccgtcacgttatgggtcatctgacaacttccgtccctggcttttcgcatatcccccctgccaaggcgcgccgactggttgttgcggcgttggagggtcgaggaaatggaggtgtccaaggcgacgtggtgttcgagaaggttggttggggccgctgggacgcgcgacgtcgtggtgaacctgctcacgatcgggatttgaacgatccgtcgtcgcctccctcaagtgttgcaggctcgttccagcagcgtggcctgcagattcagggccagtcgggtcggcagggtggcaatcatcatccctaccgcatgagctttgccgaatccacggcattctcgtacaccgacgattatggcatgcatggagaccttgatatgttagaacacgaggccgataagatgtctctcgatggcgacgacggcgaatactgctcttcctccgaagctcccgacgagatgcaagaaaccgagtgggtcgaaggcgatgacactgatgaggaagactgggcacaaattggcgccgacgctttgcgcgcccgttcgatgaacaacaacggcagtttcatcaacggccatgtcgctgcgcgcgcaaagcctcaaccttccgggattttccccgccacctgtccatctgtggctaagttgccaccccgcacctttgacatccaggaacgcgccgctgtggaggcgctcctctgcctgggctccatgtaaagcccctcatcataatcggcgttatatttatttctactctttgcgcgatacacttctttcacattcaaggccgtcgaagctggtctggaccgcttttggcgttccatggtttttcggcaaatatccaaaaaagtcaaaagccaggaaatttggctagcttgcagtgcaactacctcgattgatgggcgttgggttggacctttgtggtattgggtttccaagatggcgttcaagtctgcaccttcctcttatgcctgctacgaaacacattgtcatgacgattcagggtggcagtttcgtcgctgctaccactatgacaactccaaataccccttatcttctccgctctgctacttttacgtgggttggctcagtattattgtctgtcacctactcattctggcgtttatccttgcattagttgagtcagctaccactgcttcaagactcctatgtttcttttttcatccttcgaccttttttaatactctactttgtctttttttttatatatcagcttgcacctcccgatcacttggaagatctcagccatctggaggttctggtcgtctttattgatcgcactggctcttctgacttggatggaatctcagtcatcttcactgatccaactgagaagttgtcctcttcctctgccctgtttctctctctatatatatttatgtttatctttatgtgctctacacataatctgttgtacattgcagattcatcatccttgcattaccctggaggttttggcttcagttctcgaggctgaatactttacgcggatgaaagtacataatcacttagctagtttagaaacttaacgcgtcgcatatcctgcgcagttcagttgccatttttctctttcatttgtaatctaagtgttcatggtatgtacttatactcatcccaagaccttacaacgtcgtagatgtaggctgctgcctgcatgtcctcacacttgagcccaagtatcagagctttaccaggaagaacgtagtcagaactacactccagcgccactactcaatttcaagatgcaagtccaaccaaagcattggtattaaagatatcattcaaactaaactccaagtacaattcccaagtccataacccaattcaaaactgccatcaacacatgcaaatcctcctccagaacccccataataagacagactccaacctaacccgtccatcccctaatcatgaatatcattaatcttcttccaaacccccttctcaacctccgccaacttactcccagaccacctcatccaccacttcgccgtaccgacgaacccctcctcctcttcggggaagatactactcgccccgccacctgacccagctccagacccagcaccagcaccgtagtgcagcggcagagtctgcgtctgcgatcccgcgtgcgtctggtacacagacgaataaggcgtggaggttgagttcggagtaggctgcggcgggttgtaggagtatgactgcgggtagtttggctgcgttggctgggctgtctgggttggctgggctgtctgggttggctgggctgttggtggaggcggttgggggatggcttcgccggctttgggaggaggagggactagagaggaagatgctgttcctggtcctgtgtatgctgttcctggtgatgggcgcgcgccaggttggggtgcaggtggattctgggttgtggatgtcgcggtctccgggaaggaggttgttggtgttggttcaagcgcggttgttgctgttgatgttgctgttggggttggctgtactgctgttgcgcctggttggggtggtgctggtggctgggtggttgtgtagattggaggatttgagggagctgtggctgttgctgttgttgttgcgggtgctggtagaggttgggagggtgcgcttgctagtgactcgattgctgtggcgggttcgggctgcgaggttgttgcgtgcgtgccttcttcctccttgttggagttcacgggcgcggagttgtaggtttggatacctgttggggcggacattttagaggttgatgtacttattgttctgggaggcttaggtaggggagtgaaggagctttgtagcttcaaggagcttagacgtcatgggtattgccgctgtggagcttcgccgcattgggacacctctcttttctttcttttttttttgtctacctacggttcagtcaagtattccgatgacaaaaattattggggctcgaatggttggctatttgcttgcgcttgtttcagttatgttcgcatagctagaagcatccagcatacaggcagccagccctcaattggttgatctatcaaaactaggccagcacaaagaacacgtccaaggtccgaagctagttggtatctgtatcttagtagaattatttatttactttcacaatgtttacgaagatcaagttgaaaaaacgaaaatagtttgctggcagtaaagtacattgggtacaaaaagggaagaattagaccattctatgcttcaagatccttcggacccatttcttgacgcatctatcttttgaccatcccatatcctcaaattccacgcccagtggttacactgggggaggtgaacaccccctgtttcagtataactacagtggcaagagactcacgtttcagtgaatcgcttagaacttctttccgaggaggaggagctgggccttgtcgtagatggacaggacaccggcaccggcgacaccacggaggatgttagcaccggcacccttgaagagagacttgaagccctccttggcgatgatctggcgggcagcatccatggagctggtgtacttaacggcctcaccagaggtcatcatcatgcggcggcgaacggtgtcaagagggtaagaggcaacaccggcaccggtggtgacggtccagccgagcaggaaggaggcgatgaaggagccctcaagaggaccaacgaggagaacgggcttgatggaatcgtacattccgaagtagagaccacggtagacgacaattccgagaacggagggaccgaaaccacggtagagaccggcaataccgtcggaggcgagggtcttgcggtagacatccacgaggccgttgaactggcgctcaccggtacccttggaggacttggcgtcgttggccagacgggtacgggcgtagtccagggagtagacgaagaggagggaagtggcaccggcagcctagagggtttgttagctgtgagccgtgtgtgagagttttcagatacgtacaccaccggaggcaaggttgcccatcatccactttccgtatccatcacggtccttcttgtaggcgaacatggacttgtaggtgtcacggaaagcgaagttaagagcctgggtggggaagtaacggatgacgttggcagtgttaccacgccacaaggagacaacaccctcagcggcggaggtacggcggaagcagtcagcaatgccgttgtacttgcggtcgagacgaccctgcttgagcatctcatcctatttatcaaattggttagatactaaagtgatgaagatatcgagctgccgaatggcacgggccaagggagaaaatttttcacgagttgcgatcgatgcgaaaacacaactcatgtccaattcaatcacaatcaattgttgtgattctctgcctctggctcattccaatcggtgcatgacgggtggtaaccaacctggttctggatcaggagcttgacacgctcaatgggggcagcagcggtcttggagacagcggcggagacaccacccactaatacacagttagtatgaaaactcgagacgttgaagcaagcaattgctgataatggcagatatcaagcttgacacgtactcaggaagtcgacaacaaagccctgcaaattctgttagcacgactgctcggttcaattcacatcgagaaagcgatgaccgagccttgaaaccgcgtttcgaaacaagctcgatgattattgatggtggacatctcatcggtttgaatcttcacgcgacaacaaggccagctctcacgggtttgcagggaaacactcacgggcatgccgaagatcgacttctcggcctggttaacatcaccggaacccattttgaagatagtgcaaaagaaaccggatgcaaaaaaaaagagaggagatggaaagagtgtcaagaagaaagagacaccggggacaatgaagaagaaaaaggaagagagaaggcgggaaggggggccagaaaaaaaaatactcgaccgccgggcgctaaggcccaatcaggaagcccaggaggtttaattaccgtataatacggttatcatgtcggtactggtttgcctcctgccgatatctcccgatccactgaaaattctgcaatctggccaactggtctggacggtgctatgggcatataggggtctttgttggactgtcaaatggaccacacggttttggtctacaatacagctactccacagagtcacttttgtctctatccttgggaaatcagtcgatatcctatgttttcactgtgatcatcgacatcctgtagtcccgagcaacggcccaagcgtcggtgcattgtaccgtaggggtacggtgtatatttccctatccaatgccgggcctccacctcccggggcaacctcctttttgctggccgggtatccgatggcgaaccagacaaatgatatctcggacttgccaccgacgggattatttccttctagccctgtgttctggggcttttgaatgatttcgaacgtccccgggtgtgccatttgaattcaaacttgagcccaaacgacccgatattactagttgcggagggagtagcctttttcgtattcgggcgagtggattctccccaggtctcctctctacactatcttgttccttcagtacttacttcctgggaatatctaactatggcattgtagcataattcaacaacccaatagagcaaatgtgatccctctcaggtcttgcactgatacggagacgacactgtgatatgtgagggatccctagacttccacggttgatgagacatttttcctggctactatttttatgtcgcgggtacaaaccttaaggtgatagatcgccgcatggacgatgtacctaggtacttcacatgttaggcaatgctaggtacccaatagtacaacattggctccacctcccttggtcctcagtgaaattttctgtatggagcactacgtacgttcaacgcatttcaagctgcatagcaatatttggagcttcctatagcttaaaatcagatttcccgaggttcaccccagcaaccgctagcgcctgagtgggcccgcatcgcatgttagctttccgctttgggagctacggagtcctacaggtatgcatacgcctgaaaaccactagatttggagaaagtctttctcaatagaacttcaggatatgatgatagctgtaatatctctcacatttgaatgacaaactagaggcgcaatttgtgttctatattatagctttcagcgaatatatattccgagtactaccacatcgtatcaagcacgtgctaaccctgtatacttgcgttttttagcacttcgttcatttcgacacaatgattttcgaagttgagatactatcaagttaaagagaaaataattgggttcattccataaattgatttgaaaaaggtataaacaatggtagattgacagatgcaacaacttttaatgcttcttcgacctctttctcttcttacgtgtgccatctccttctctgatatcaaccttatcctcatccacagcatccttaggctgactaggttggacatcaccgccgaacttgaacaccggcccattctcgtcaccgaaagtgtccttgcgccactcgcgaagccgggccttcttgcctaacctcttctgatcgcgccgcttctgctcttcctcgcggaaggtggcgagcttcttcagaccagcgaacttgttgagctgtatgtcgtccgccatgaggatgtcccgtgccgtcaagccaaagctctgcggtgaggtttcgcggtagcggaactttgtggcgttcttctttgtagctccaggaagcaaggtgatgtcgagatccaggttgcgctcaaccgcatcgtcaatgcgaagacggtctttgcgggcctcacgtttctgaatccgcttctcttcggccttgctcttcttcttagacccggaagcctcgtcgtcatcttcgtcttcggcttctgatagttcgactgtgggtttcgcttcttcatcctcgtagtctgggaccaagtccttgatatcgatatcatcatcccaggtaggcttcttaggatgcttcttcttcttgcctccctcattttcgctgtcctcgccctcctccccggcgtagtactcctcaccaaaccgtttttgcatctccgcttcccagtttgagtcgtcccaggaagcatccaggaaacgagaccagtcgtcgtccgtgaattctgaggcacgaagtcctgcaacttccttgatttgctccacctttttctgtagttcttctgtcttcagtttgcgaagacgattcttctcagtttcgcgttgctttttctcctcatccttgagtgcgcgctcagcgtcgcggatcttcttacgggaactcttctcttcgcgacggacggattgcttgttggtgagatcacgagagtgtgtgactatcacctcgttcatcttgttggggtcttcaaatcggaagttgtacgcttcttcaatagcttccgcccgatcgacgtcgtcgtcctcatccgaatcgaacggatgcaactctggcctgtcggtggggatccaggctcgtgctgacaagaagttggacaggaaagtctcggggtctttgtccgcattctcgatatcgagtttgatttcagatttaggcaacgaaatgtcctggccgggcttgcggaccatgaactcgtcggcatcttccatctcttcgtcagacttgtctgccgctccgtgcatctccttgacaatagcattcttcaagtcggcttgctcttgggcataggtccttggggtactttcctcctcagctgggttgacaccactcagaagattttcggtatggtattgtcgcagcgtcatggacttttccttggggccctttccggcggcggcttcctctgggtcgtacttgctgtaaaagctggcatctttgtcgtaaacgcgaggatccttcgaacgaatagcattcaaagtcgccgaaatttcagcatccagagctactgtagcgagctctgcattgtcgtcctcttcttcggagtcggaatcctcagagtcttcgtctgggcggtttccaagactggaggacttgccatacttcgcttccactgtggattaagccaatattagcacatgctagagcgcaaacatttcgagtgtaagcacgtacacctcgcaacttcttctctcttcttgttgtgttcaaatcgacgagcgtagtcttcattgatcgtgaacccggtatcagacgactgcttgccgaggagaactccaccagcatcgtccccagagtcactatcgctatcttgatctaagagctttcgcattttcttagaaggaggctccattttgtgtgatcaggtatgtgattgaagaccgactcggcgaaacccccaattggcagaaagaaaaaaaaacctcacaccgctctccacattaaaaccctcgagaatcaggcaccaaggcagaaacccaatccttgacgtagccaattagatcatcggggggctcatctgaacaggtctgaggaggtctcaggcaaagccgagaccgctacaagccagaaaatcatacacgtgggttctctccagggcttggaagttgaattgatcaccaagtggcatgaacgagaggaggcctattcacacctctcgcgtctcggtctttactcgcgttaagtgtatggccggagacatgcactagatgtcgactcaagcacaaaccccgttaccccaagttgggaaacttgtgagcgttgtgtgagtatctcatatgcctgatattggaattctcgttcttgtatactaatgcatgcgccccttttcagcccggtcggtctcaaagaagccgctctcgactcgcccacctttcgtgccaccaccctttatttctctgatcagatcgatttcatagagaaatggctcgacggatatgccaaagctgcaaccaagctctcctacgagctgaccgctatggagagtgtagtgaacaactttctttcctactcgacacatcccctcgtggtctcggaagcggtcgttgaccatgattacacacttttggctatgaggagatgtggtgaggggtctaaagatctttggagtggactcatcgcaacaaccagaaagttggagtcgttgatttccgaacctattcgagatttcattcaagaggatctgcggcagttcaaggtattaagaagcccctcatccaatttgttctcggattatctgacacgtccataggaaattcgccgcaacctcgagcaatcacagaaacagtacgattacctccaagctcgatatgcctctcagtcgaagtccaaggaggcctcggccctgagagaagaagcatttcagctgcacgaagcccacaaggcctacctgaaagcatcaatggactattcagtacagggtcctcaggtacgaaatgcactggaccgacttctggtcaaaatctcctgcgatcaatggagggaattccggggatttcacaatcacaacagcgggaccttctcgaaatggtcgcgtgagatggatcgtattaagggttgggttaatgagatggaaggcagtgagaaatcatccaaacgagagctgctagccacccggaagctcattgaggaagccgcggagtttgcggctcgaccatctcgtgaactggaggactacaatatttcgaccgttccgtaccttggctctcgtcctatttcggcacttaatgtgagcaaagagatgagaccagagaagcaaggatggctgtatttgcgcacattgtcaggaaagcctactcgcacaatctgggtcaaacggtgggcttttctcaagcacggcatatttggatgtcttgtacagggctctcgtactggcggtgttgaagagagtgaaagaattggtgtattgctttgcagtatccgtcctgcatcacaggaggaacgccggttctgcttccaagtgaagaccaagaacaacaccattctacttcaggcagataaccagaaggagctgatggaatggattggtgccttcgaggcggccaaacaaaaagcactggagaaccccgcaagcactgatctctcggtttctggaaaagtcacagttcaagaccctgcattttcaatttctcaacccccggctgcggagttcgctgcggatcctgctgactctcttacccctcatacgaacgatgagtccggagcgggggatcgcagtatgacgcttcctgttccagaccgtgatggatataccatgagaaatagtaccgatattggaagcagcagaagaccaacaggcttcgatagtgagagctctgcaagagaacatgcaaaagagcatacctctagactcatccaaaagttggatcttcaccgcaaatcgaacaatgcggctccactatctccttccgtccccggccctgcaggtggaatagccagtctcatctctgccagccacaatattctcccttacagcaacgccggtccactcaacgccaacgtcgatggcagtcgaggtcgcagtttaagcaacgtggatgatcctggctcaagtcttgcacctgccacgctcgccaatcccccggcacccacaagcatgagcaaggcggcagtggttgtgagcaatgaaagaggtattggaataggcgtctctgatagtacgggtggtatgcctagtggtatgatggcgaacgtgtggggtagctctaactggggtttcatgaacaagcttcgacgggaccaacaccagattgatggagtatctgatgggccgtctacattgggtgatggctcaacacacacgattgccgcacaacccgatgcagcgggtactttagtggcaccccgacagcaatcaggtccacgccacaggcagacagtaagccttgatggggatgatgttaagctcacgcaagttgcactgggtatcgggtatgaatatcccagctactaccctcaacaattgaggattcaagatgctcagttcagattgcttttcccagacgtcaagagagtggaagcattggtcttggtgttcagagccacctggagccctaacgaccagcaagaattccccggacgagcttatgtcacaacaaggaacatttacttttatagccatcatttcggactggttttgactaccggtgtgtctttggagagcattaaggaggtaactgcagctcctgggcgagactgtgacttccttttccttcatactattccaccactcggcagtgatactcctggccgggttacgatcaaaactttccttgaacctctccgacttcttcaaaaacgactcaacttcttgatccaatgctccattgccgtcgagcaattgagtttagaatccttgatcaaagctttgatcaagatggacactgggtcttcagcccgaacttccagtgcagatagctgggatgatctttcatccggactcgcaggcatcaaacatgacgggggcaaagctacagacctgggccatgcgaaggacattcgactgcctatttacgttgacaaagatcttgagctggatggaggcaggactgcccgtggtcgggatattgctaaattcagacttccaacacaacccgtggagtatgttccacaaggcgatcttgtcttggtgaccgaaaaaattctcgatataagccctaaagctttgttccatatattatttggcgacaaaagcgccgtgtggcagcttcttttacacgagaggaaagctctaggttcgtttattctaaatccttaatcacttatacatggctgacatttcaaagagatccaacaaggcccatgggctagtacggacttgcggcatctgaagcgtgacttccactacaatatcgccacgacagatatccttggtaggcttgattattgatgatcttgagatcgagccatgactgattttgtataggtcgtactcacgaaaatgcgatatcggattatcagatcattgatgttctcaacgaccatctgtgctacgttatcacagataaaaagactccgtggcatctccccttccgccgttcgttccggttggttaccaaggttgtcattacattccaggccaagtcgaagagcaagcttgctatttatacgaaagtcgagtggctgtggtctccctacggcctcaaaagtgagttatcccctcccatccctcccattcgaatattctaacatacctagacgtgatcgacaaaaaagcaagtgaagatctagaacaagactccttggatcttgtcgacctagtcagtgaccaagtacgtcgattgggtgcacacagtcgcaccaaaaaagccatcacgatcttcggccatgttggacgccaaaacaacgtctcccaatttagtggcgctggttccaacctgaagctggaacctcgcaagccccgaacacagcgtgctatgcacgaccttcttttcgagaccttcttgtcattcctcgaaacgagtgtttccttcataatggtttgggcgtttgacgtagttcgctggtcttggaagaccatgagtgctcacaagatcatcctgaccatgttggctacaagtgccattttgaatggatactattcttcgcgggatagttgggactggtggcacgagagacatgcaggcaacttcatggcacggctgggtgtacagccaaacctcgttatgagcaaatctatctacatgcgggatattgatgacgcggttgcaaactccacaatttggcccggcgccggcaatgccagtgattgctttgctaccttccacgagcagaccatgcggtatgccgatatgcctctgtcgctcagtccatccggaccccgggatgcattgaccaagagcgccatcaaacgcttccagcaaactcgtgagcgtcttggcatgtatcgtcacaaccttcttgtcgcattgcgtgtcgtgaacagtattgagaaagaggtcgtccagacggaatgggagcgttggctgcgcgaggaagtccggcgctgtcgccaggtcgaggttctccttggcggagaggccactccgggcgacgactcgcagacgggccgaacgaccaaagctgagcgtgtctttgccgagcatgctgacaacgtcaagcagtggcatgaggagtactgctcgagttgtcgaatggagcaagaacatgtcatatccaatgatcctgacctaattccttgattttcttcctacagcagtttccgtctccgagcatattgtcaagccttctgtacagccatctcatttcttgcttcttgcttatcactataccctgtggctagctgatcatatgtcaaaaaaacttgtgtataatttcggcgcatatcatacaagtcgtcattgctttgaatgtgctctgtatatctgtataccacatggataatgtcaattcactgcttttttgaatgagtattcgtcacataatttagttaacccgtaagggttgagaatgcaataggtttattatgtacatatgagaaccatcaatatccacgcactcagttctgcctcggcttcacctcaccttcatgcacaacataatatgccaccgtcccgtccccacccatccccttatccaccatagcaagcaaaaacctttgcgcaccccattctttggtcaaacgagtcttttccttcttatcatagtattgagccagcttttctgccttttcaggattcagattcgccgcctccggctgcatgcttgtaggaccgacagatcgatcatgctctttagccttttgctcgaactcaggaagccggtcaaacacagcacccatatgacgcaaggtccacggctgaccctgtgtagttggtaccacgaaaatccgctccggcttcaggtcctcatcgcggatttcgttttctagcatgtacagctgctcatctggatgtgtgtacacgcggtgtggggggtagccggatagcagagggattggttcttgtggtgattggcggggttctttttttaatgtgtttgagtcgtctgatcgtccaggaatgatgtctcctattatagaggtccagaggtgttggtgttcgaggttgtgctggacctgggcggatgttgcgaggtggggggactcatggcctttttcggtgatgcgttcggtgatcgccgatgcctcgggctgtttggtgacttccagtatgtctgtcatcatgaatattttcttggagctttttgtcttgttagacttagcagaggagctccggccgaggatttttgggattcaccgcctggatagatctgatttattgacaccgctttcctcaatgggattgtatagttgagataagaggcttggaggctcctaggttagaagagagatttggaatgataaaatgaagaatggcaagtcagatatttcttccatctttgcaccgtgagttcaagtaaaaatagaacagaaaaatttatgtggggtggcgatcataataaggcgaagtaagaacacatggcatcttgttgttttggtttcaggactccaggacccgacaacctaggactatcctcgacacagggtcatttccccaccttttcgcatagtttatatcgccttgtcttgttcgagtcgcttggattttcaacttgtattccgccttgattacccgcaatgggacgacaaaagcaaggcgcgccgctcaagagagccccttcttctcaattaatgcacatctcagaagagtccgacgtgggacaaaattctggaaacaatacagacacaatctcgaccgccaagggaagcgtgtccgaaaaagcatcagcggccctggagacagtcaccgacagccctgggctgacgcaacttgcgatttgtgttctcggtatatatgcggcattgtaagtgcctccaccgctaggactggccggagaaactaacaagacgaaaagcctctcgtggggtgtgctacaggaggcgatcacgacaaccagctatctcgttcgtcctgcaaccgttgcggagccaaaccctccaacggagcgattcacctactcgctggtgctgaacacggtccaatctctcttcgcggccatcaccggctttgcatacctactattctcaacaccgagtggccaaaaaattccatctatcttccctacacgccggatcatcgtccccctgcttctagttgcaatctcctcgtcacttgcgtcacccttcggctacgccagtctcgaacacattgactacctgaccttcatcctcgccaagtcatgcaagctcctcccggtgatggtcttgcacctgaccatattccgcaagagatacccactgtacaaatacggtgttgtcctgatggtcactctcggcgtcgcaaccttcagtctgcaccaccccggaactagtaagaaagtcgctgccaaggaccagtctggatcctccggctggggcatcttcttgttgtcaatcaacctccttttggatggcctgaccaacactacgcaagaccacgtcttctcctcgcccaagctgtacacccgcttcaccggaccccagatgatggtcgctcagaatgttctctcgaccgttctgacttctgcgtacctcctgatcatgccgcatctctcacagagcgggattttgcacaacctcctgccattccccattcccccgtctaatgagactgaactgtttggtgccttctccttcctctctcgccacccagaggcactgaagcatgtccttgggttcgcggcatgcggggctgttggccagcttttcatcttccacactttgtctcgtttctcttcactgttgcttgtcactgtcaccgttacacgtaagatgttgactatgctcctcagcgttttctggttcggacattctctgtcccgtggccagtggctgggaattagtctggtcttcggcggcattggcgccgaagcagtggtacaaagatcagagaagaaggcgaaagagcagtcgaagattgaggctgcaaagaagaagttgtgagttttttttgcgaggctttatagataagctttcatttgaagagcatttagatttccaaaatataaaccgcaagttacagcctctgggtgggttctcgtttcacatatttttctcgggccttttgtgggtatattcttaaggtgatcgttcgtctttcagaggacgtaagtaatgggaagaagctcacttccgcccctcaaccatgatgatatgatatccaaacccagtcttgacctcggcatacttgggatttcccgttgtgctagtttcaagctcaaaagcaacattctcaaatgcagggtccagcccgcccttcgtcttccatccgagcgaccctcctgcggaaaagagatcagccgtgttactttcgtccctcaaagacttccttaccctgtctagccttatcctccgagaattcacgagcaacctcatcgaacttggtgccattgcgaagcttctctagggcttcttctttcttggcgtgtttctcgcactagatgtgattagaatgagctatataacaaccctttcccctgtccacgggatctggtggtatatcggctacccctcagaactataggcagaggatccgagattgaaaagaaaagagccaaaaaacatacaagaatgtgccgcacgttaatcgactgtgcgcctttcactgctcctccctttccaccttttcccttggcgtcgtcagcagaggcatccttgcctttgcccttcgcggctttggcgttgttcttgggggccattgtggaggaaaggtatcaatgatacgttgttatcgctgtctcggccgttgtttgttcagattgagttgatgtggggtggaaacttatgcctgaggctgtcaggcagaaaggatgtgtgacgtggatgcgggtgtattgactctctgctctaaagagttctagttaggcatatgtatggaattatcccagtttacacattgcagcatcttgatttctacaaaaccattcatctctcctttcccttcgcttacactgccaacccctcatcgatagcgattgctgagacaaaggaccgaagtcagcaaggactagggactacgtatctactagtccgagtttgaaaaccaaatgggatttgatcttgaaaagtcacgcatcatcgcattgcccgaggatgcattctatatatcggacttcattacagaagacgaggaggactggctacttcagaaggtaagtgacagtgcttttcttgtgaacatgtgtccttagaaaccatgccctaagggattgatgtcaaatattgcactaatatatgtggttatcattatgtcgtctttcttcaattatacctatttagacgttgcatgtcacttattcatgctcagatctcactcactgcaacaattcacaggtaaagtcagcaccgctgccgcgctggacccaactctcgcaccgcagacttcaaacatggccatcagccctcaccaagggtaatgctcttctcgaatcgcccttaccagcttggcttcgatcaccgatcgtcgaaccgcggtttgcggccctgtgtatctttaatgatgcgccacacaaggcgcccaatcatgtcctagtaaatgagtaccaacctggacaggggatcatgccacacgaagatggagctgcgtactatcccctcgttgcgacagtgagtctaggggcgccaattgtgctcaatttgtaccacaaacatgcccagggggacagggaagaaaatgaggcaccagccaagaccggaagggatgttgccgggatacccgacacaaaccgaaggccccaatacaggattttgcaggagagacggagtctcctgatcacgaggggcaagatgtacacagactttttacatggcatcgaggaaacgacgagagatgaggatctgagctctcgctctatatgcaactgggagctcttgcgagagagggaaccgtaccagagcgggtggtatgagcggaagacgaggactagccttacatacagggatgtgcttcaggttgtgaagatggggaataccttgaagtttttaagtgggaggtaacgatgacctcatttccaaattccggttcttttatttatttttagctctatgttagtaaacatatggaatcataaaccaccagtcctgcaccgagtctttgccgaacttttgcgcataccactgcttggtattccgagctgtcagacccaggttgaccgcgacgaaagccaaacatgaaaacatagttttattgatccattcacctcgcggagcagccaacagcgctaacgagagatagatgatgcattctgcgccatagtggggacaggcaaccccgcggaacatgggatgctccggaagggtatattttttcaacgagtagaggtagtgatgggagtcatgctgcaaaccagacgccaccaggaagagcgggacgagaaagaaagtacgcaaacttggggcgttggtcatctgtagatgagcaatggtcaggtttttggtcaacagagtgccggaaccctcgatccaaatcgcaacccctgccgctaggtagaaacccaagcctaacaaccagtgcataaaccacatctgggacgacgagggtttggagaaaacaaagcactcccataaccgccgcgatccttgtatactcaatagaacacaacagatcaccaactgagtcagggacatggaatgacgttggtggtcctcgctgacgcgggatgcaatggcttggaaaaccaaaccccgcgatagcaattgcgcaatccagaagacagacgacaggacagatgcaacatagaaatgagtgaaataactatgtggcacctgccaagtagcaagatagtcaaggaagcccttgctctgggtgggagggttctgggcggtcgatggtgcagagccggtcgaggccgaggccgcgcgtggaccgtaagtgaggaagcgggaccgtagtgaggttgggatgctgatcgagaatgtctgcatagggggtcggcgttagtcgggttcatctgcaggtggtgttcactatcaccactatcacatcgcgtatcgtaccgtggcggcggccagcaggaagaacgcgcgtagagcatccacggcatccatgccagtggcatccagggtgttatctacccattgagagattagagacatggctcttggatgagcgtgttttttcccccgccccttctctttttttccccccgtctctgtttcgtattgtttctttaacttagtgtcattgtgatgatatcagtgagttgttttagggaggtgtttgtggtggagaaacccagcccccccgccgatccctttcgccaacgggggcgttggggggtcgttgggcnnnnnnnnnnnnnnnnnnnnnnnnnnnnnnnnnnnnnnnnnnnnnnnnnnnnnnnnnnnnnnnnnnnnnnnnnnnnnnnnnnnnnnnnnnnnnnnnnnnnnnnnnnnnnnnnnnnnnnnnnnnnnnnnnnnnnnnnnnnnnnnnnnnnnnnnnnnnnnnnnnnnnnnnnnnnnnnnnnaccccccccccccccgccgatccctttcgccaacgggggcgttgggagttagttcggcctcggggttagctcagggataagaacaattagggtagatagaagataaagggccaatttgcgtctgataagagttagctctaagtttcttgtagagatgtttcatgataataggcttcacaaaatacatagatgggccggtgcgctgagtggcgactttgaggcaaatccacttgaccatattgggtctagtctggtcagggtgtttgtcgcatttgcaacatccaaatcgggttagtggccaaaggtctgtgcccccttttcttctcggtatcacggtatcacggtatcagctgtatcgaccgtatcaaccgtatcaaccgtatcgtctcccgtatggagtcttcgccgaacgagaaggacatccaagaacggagtatgaaaaaaacaaaaatcgaaataatcaaatatcaacgcgggttataacctcaccccctctaagatacaagcatgtttccagtagccaaaatccaacctgcagctcgatgattctactgtggccaaacctgccccagtgaggagccctagcccaatgaatccagtcccattcctttcccttcccgcttttcctctttatttctctttcttcccccattcaactcccaagtgaaaaacaaccctcgatttcatcctcgatctatatatccataccagtaaatcctatatccggacctcttcgaccaacttcccgtatcgctcccgtatctcggagcggtattgcccacgtttcaagactctctttgcgggtgaaacccgcggtcgaggatcggtgtccgcgcacaactgctggcgttgtcgaccacggttgttttgtcggtcgcgttttccccccaaaatgacgagcggcatttcaagtcttcgagtgctatcgctatgagtgatgtcgaggcagtctctttaccagctgccctggacgtcggtcagaataggcttgccacggtaaagccagaccctgttggtccttcatcaccaggcaaagctcgtgcagaccctcacccacgggtaaacagcaatggaccgacacgtgtacattcggaaggggaggaggacgggcctcctagtcctagggcggattcggaggctgagacaataattcaatcaggtcgggagtccttgtcaccggagaagaaaaggaagcatatcaaacacgatccgagtcgccatgagcctaacggaaccgatggacatcagcgaaagaaatcacgggtgcttgacgacactcgacaacgcgaacgcgagcaggaacggagccctccttctccaagccaccgagaaatctcgccatcggtggtcaagattgaaaaggtcgatgatacgcagatgtcagaaccggaaggcgttaccaatggagtcgaccttgcgtcagagatacctcgtgctttccgtaagcgaagcttaagtgacagtgctgaggaacaacaagatcatcgtcgcgcacatcctgtgcaggaacttaaacataccaataatacacgcctctccagacctccgtccaacgcgcgatcactctcacccagtcgaccctctcaccaacgatctgcttctggctctcagttcccgaagaaaaaggcgccaacccctgtacttacaggctctgggcgacatagctccgaagacagacaatcgacgtcctcttctcaaagcagttctccactgccgggagcgcatctacggaagcttggttctggagtcggtgcgtccgcatcgcctgctaagcaaatgggaccgaagaagttgcgtgacaagagtggccggactcctcttgcacgagcgtgtgcggaccggaaacatgatcaagtgatgatgcgccatgctgaacgcccagaagacattaatatccccgataatgcaggcaacacccccctgcagatcgcatcgcttgctggcgaagccgaaatcgttaagttcctactagatgcaggctgcgagattaacactaaaaacattgacaaagacacaccgttgattgatgctgtggagaatgggaatgtggaggtggtcaaacttctgcttgatgcaggtgccaacccacggactgtgaatgctgaaggcgatgaaccttatgaactggttccgtcctttgtagatgatgatgaatacgaggagatgcggaaagcgcttgcagacgccaaggccaatttgcggcctggacgacgctcagaggaaaataccagaccagagagcaaggaaccttcttcgcgacgggcttcggcagttagaggatcagcagctagcccccgagattcgcctcccatgcgcagcccccctccagtgggtgtagcaaatcgacggaagggtgggcgaagcgaagctacgagaaatgaccttctgtggacgaaacccacattcgagaatcttcgagagtttgctgccaaaggtgacgaggctggggtggtgagcattctgaatattttgcagaaagctgacaatgcttccttgattgctgcggcaaagggtggccatcacgatgtgctttctcttctgtatgcgatgggcaatgcagacgcggatccaaacccgttacgtggtcagaaaccaggttataacacgcctatgcttgctgcgattggtcgtggcaacagcgctgttatccagctcatccttaaccaacccggattcaaccctacgcgtcgactgtttgaagaaagaacatattttgaactgtctcgcaatcgacagggtgagaactgggaggacgagcatcagattctgaaggacgcgtatgaaaggtttgctggtttcgacaagggtcgcaaggacgactcgccccgccgtgctcgtggaaaagagaaggaggagaaacgccccccacgccgaacctcttcctctcccgtcgcgcgtaaaaaaaacaacagccccaacgccaaccgaaatcgtgattctttgaaagacatggatctaatcaaagaaaagcgtcgtcaaaaagagcacgatccatcacgaccatcggattcctccaaacccaaatctgcgttatccgctagacgagacagcgagtctagtggggtggcacccaacgaagacatccgaaagagacgactcattcctggacgtcgtccacaggagcgtaggccaagtctattttcgtctgattcgctatctggacgtgaagaggcaccgaagccgcgtgttgacacagcacttgacagcacgatgtctttgaagcgcattcgcactgattggtctccggaacgatctcgttcccgtggcacagacgctgaccgcttatctcctgagtcgcgcaaaaagaagagacgggttgtttctgaagataagtcttctggtgctacacacactgcatcaaagcaacctgatgatgtcagtaaaccacatcctcgccgaccaaatgacgaatctactcgatctgctgaacctcaaccacacaaatccatcgacacctccaagaaacctccaactcgcccaacttcaccccgtcatgatccggttaaaaagaatggtgatacgagaaaggaatcgcatgagcccaaagccgacaccatggaagacacaatggccgtcgctaaacgtctcgagcttgaagcccatgaacgtcgaagagcccaggctaagaaggtgcaagacgagcgcgccgcgaacgaaaagcgcattgcagatgaagccgagcgcgatcgacttgccaaagaagaagctgaacgagtagctcaggttgaaaaagccgaagaggaagaccgcaaacgcaaggagcttgaacaacgacgcgccaaacaagctgaagatgatcgtctgaagcggttggagcaagaacgtgctcgagctgccaagatgcggcgcgatcgcgaggcagcagagcaccgacgtcgtgaggcacttccaagtcgccttcgtgttgcagcgaacctcgtgggctcaagcaacccccgcgcgaaaagccatgactggctcaagtcttttatgcctctcgttaccgctctcacccgtcaactcgaccccagctgtgatgtggatgtcgccgacgagaaatggatcccaaactatttggttgcacctcttctggctaccaatgatctccaactttcgcagtatcccagctgggagaagcgaaaggcgacaccgactcaacgtgtgaatttgtggcgagtcacccgtcgcatgttgacccatacggatgatgttggattccaaagctcgagcatcggacagatcatgcagaaggattgtgatacacgccccaagtatttcgagatggagcatgtcttctggatccgagtaagttttcttgtaccttgcaagttatgcttcaaactaacaagtattttagctttccgatttcacagacctcgtcccacacattcctcacctgcacggcctagagctgcaattcttgaacatgcacgtcgatccggagccgccgacggctggtgcagatttcggcactccccaaattaatggccatggcccgggatcctcggtcgaaaccaatggaaccgggctcaatggttatggcccttctcggtctagtacatacgtctagttttgttttcagcgtcttttcgccaggacccggcgcaatgtcagcaattcagcgaagcggtgtacagttcggattctgattgtacgattatgatacctcttgcgttcagtgatgattcgactatcattaggtagttttgttgggtttcttatgtagtcacactgtaatcatgcatccccgtgtcaaataacactgttcaaactcatatcttcaagttcgtatagatatttatagtaacttatcaaaccatatataagctagaaagctaaagatgataagtgaaaagtgccatcaaaccgaacttgtcgtacattgtatggacaaatatatcacgtgactgcgtttgcggggacagcatgacataatcgtagggcacacacagccgaaaaagtcgaaatagcgggaaatttcactgcgcccgctccacctcttaatttctctctccaacaactctactcttcgaggatcatccgatttcaagcataacaagcaacaaaatggtatgttttatacctgcgaattaccctcacaccacatccgtacccaccctgcatcctgtcacgacaattgagacgctggaatggacatggccggcgagagcaattgcgtcgccgcagtagaggtcaccctcgtcggatgtttaatctatacgctgcaccggtccaaactaatcccaagtctcaagagtcacgacaaagatctacacaatggaacctttgaagcaccatatactaataagaatccttagtcggacggagaagagcccacatcccccattgcccccgccgaggaggtcgaggtttctgccgatgccggtagcggccagatgtccgtcttggacgccctcaagggtgttctgcgcgtctccctgatccacgatggtcttgcccgtggtctccgtgaggccgccaaggccctcgaccgccgtgaggcccacatgtgtgtcctgaacgagggctgcgaggaggaggcttacaagaagcttgttgtcgctctctgctccgagcacaagattcccctcatcaaggttcccgacggaaagatgcttggcgagtgggttggtctctgtatgttctccctctattgatgtaggctattcatctcggggtatgtttgctaacattttgttcttcaggcactctcgaccgtgagggtaacgcccgcaaggttgtcaactgctcttgcgtcgttgtcaaggattggggtgaggagtcccaggagcgctccgttctcctcaactacttccagaccgagcaatagattatttctattgagtggctgtgagtagcaggtctcgtttcaggcgctgggttgactgggggcatttgtggtggagatcaaaggaggaatacatgagaggtagatcaatgtcgaaactactggctggactcggagtatcctctctgggtttggtatttatgatggtggagatctgtgatatctctgtttggtcttttgaacctgtcatttcgaatcacctagtctatagccgtgccccgtttactcgggttcgcggcaccaatggcatctggacatcttgtctcctttgacacaaataggattcgaaagtatctatgtgctttcttgtagaaggttgttaatataagtaatatcaacattgtcagcaaggaacacaaaggcaatccggaaactctgcatatgaaggctattgtccaccaaaaacgacgaaagtccccaatcaatgaatgaagactaacactcaatcgacatatataggacgttcctacgagaccttctcctagatgaaatgcgcctcttgcatatgtaaccttgtcagtgacaggaggcggtttttgcgtaagtctccattttcataaatgaacaacacaccagtgacaccacatgccccaagtgctgttagctcacaattcaagcgtaagcacctagcacagcgaggaatcaagtgctgcactttcacagaggccttttcaagagacctatataataatatgagacaagaagggcaactagctatgtaactacaatatgaacttatgtacgaagtatgtactccgtatggtatccacctttcgacaagaacaaatgagaaccagcaaaaattgatgtctgtcttccttggctctataagtcagacattttgtcggtctcctaagggccattcgagactatatcaagcttaggagctgtacttcttagggctgcccgcaggagagtggatcatctgagtcagccggatttcgtgacttccctaactccgactgggtttctttgtttccttggacagacgctcttttgaggaaaaaattccctttctttttcttctttgcatagattctaatcttgatgagaggtgcatattgccattatttgccatcgttttactctgtattaggctccacatcctattgagacaagcattgtccaatatcctaatcccgatataactccaatcccgaatcccaccgggcatcgggatgcaatctgctcaaatccagggtgggacccctgcgccatatggccgcgcatgtatgaattgttcccgcgccaagtgcaaatgtattctttccgcaactggtagtggctgcgaaaggtgagtggcactgctagagagtgtggcaatagcctgaactaagcacaccggtagatgccagcgcctgaacaaagaatgccggcctgcgcagacagtccgcaaacgcaataagccggcgtcgggttctaatactgcccatcttgaagccaaactggattggattatgtccgcgtttgaaaagagtggtgttacccccagtcttcctccagattggcaacctgtagacctagggcagagtcaacggcatgagccaagccaatctgcaccaatcactcaaacctcaactagagcttcttcttcgactgccgaggaaggaaattaccctgaacactttcttccctcgtatgatccggagatattgtctctgatctacgttccgcccgccatggctcagaagtacctcgaccaattccgcactcggaatttgcaatatctcccctttgtccacatcccttctaatataacctctgaccaattgcaacagaagtatccattcctttgggtatgcattatggaagtgagcacgtttacaaatgcagaaaaaggtgactctttcgggagaattaccaaccatattcatcagagagttatgctcgacattgcgccgagcatagatcttctccttgggatcatgactttcgtatcatggtgagtagagaagaagtaccctcatgaaaaccactttcctcattacaattctctttgcagggtcacatacactaaaaggccatttctcaatgtctatgcacacatgctaatggcggtcgtcgccgaacttgggatcaatcaaagtgtcccaaatgagtattcagccatgcattctttcaaggtcgctatcggaatgaagcaaactccacccacagccagaacactggaagagaggagggctgtgctgggatgctttttgatttcatcaaggtaattagcaaatacccagagatccctaagcaataattaacagctatactaccagcacggcattggcaatgtccaggattgacgctatgcgctggacaccgcacatggaagaaagtctttcaatactcaccgatgctaaagagtgtccccaggatgagctcctgatcgcactggttaagatctatttggtcttagacagagtccatcaactgcgacgggatggtgaggtttctatcccgctagctttctatctggatagcttcaaaaatcaattggatacagtgaaaagccaaattccgcctcaccttcaacagcacagtatgtttatacctcccctgagtcttcacagctatgattaacaagacaaaaggagttgtactgatgtatctctacaatgccgaaattgtaatcaacgaattatcaataggagaccccgccattgcacattcgcctgatctccatcgacttgacagcctttacacctccctccgagcaacaaaaggctggttagatgtatggctagagcttgaaggagaggagtacctacagctatcatgtgtcatttttttccaattcacacgagccattgtcaacctgtacaagctcaccattctggaagacccgcaatggtctaagagtatggtccgagacactgcaaatatcctcgaatacctgaacaaaaacgaagccgtcatcagaaaatgcccagaatacatcactttcgaccaaagcagggaaatgaacctcctcgaaaagggattgagaatggttcaaggcatgcgaataaattgggagccgaaattattggaactatggcgcccaaacatgcccgcgaataccgagatcgatagtggtatgatccagtccgatactatactccctgatgttatgcctttgggtgggattgatgaggcttggatgatggacttccttgggtcgttataatcttggtctatgaagcttgaaacgttagctaggaagtaatatgagggttaacggctttatacataatataatataccccagttcagtcatatttgttgccatgtaagtgggggactgaaaaggaagatttcatcatcgcgataaggtacagcttcaacacatttgaaatcatcggggacttggcctttggcgagccctgtgactgcttacgggaaagtcaataccctatggtcaatacggtctttgtgaagatgatagattgtcaggaggcgcgtcccaaaaaggcttacaaaaatgtgagaagactcattcgtcttggcaacaaacaaagctcatcgcttattagagactaaggttgaacggccggatttcgatttatatcttgcgatacaatgatgacaggtccatgaccacgcaggagatagaagcaaacctagctttgctgatactcgctaggagtgagacgactttccaaattcacttaatatagcacggcaaatctcctggctgttattccgcgtgttgtactaagggagattgcatttagggtagtttggtttagagaatgcatttatctgttttcgacactattctacttagcctcgaggcggaaagtcggacagtcagacagtagttcaaccattttcacttgggcccagtaactgtcttagagtaaaatgaattttggcttatggtatcttcagggaccgggccaactgtattcatccacaactttgcctttgtggagatgcgtctaactgcgaccagggtcttctggagcttcgactttgacacgaccatggacgagagctcaactgcttgaagtattagaaatcctggaatttctgggaacccaggccgttgatggtgaatcacagcattaaaagtgtttcaattagccgtctttagttgcctttagtataactaagtgttgtgaattgctatacaaggtacccaggtagccattcatattatagaatcgctcgccacattcgtgatacgagaggagggaccattaactagcacgtcactatctgccaataaacaaaattcttgatattatatgcgcgtgcccttttggcttttgggtaaccgagaatgtacatatttatatcttactgagaaatttactgcgcatacatgtataagattgtcctacaatagttagtccttcttatacatatgtgtacaactttgaaactgagacaccaatcaacgctggaactaatgagattaagatcataggctagggctgcacatttgaagacaagactcggatttgatctttcttgaagatctagccctaagacctgtctctgaagttacacagcatgaagtttaagtgagttgaccgttgggtgtatcaatctttcccggtgaggccggctttgtggcgaattgagatgaatatctagatcggacatgcaaacttgacaagggcctagcttatgtatcgcaatctaaaagcaagaaaaacatcaaagataaggtacagcttaaagtagcacactcggatagcaaagtcgagtataaaggttgcttcttacacagcagtcgatctactactcaccattgactattttaaaacatcgcaatcaatcaaaagaatgtctagctttgtctatatttttgcactcgtgcctttggcactggctgccagcatgatcaggatggtccctaatcaggtacggctatatggagtgtgtacaccggatcaacttgtttactctttatctaggctatgattcttaaagaacacgacttcgcaataaatgctggccgaaaaggagtgctcattgcgtctgatggaaattgcatggatcttgacaacatttccgactagtaagttgaatattattcccaaaaacatgaagttttgttgacgaaagtatcagccgcataaattttggatcaatctacgtcccatgtccgtccgaggtcaaggaagacatgatctgctcaatgtactcctaagtaaatagcctctgactacaggtttatggtgttaaattatctagcgataactcttgcaacaacgagctgttcacatttactcgaccccatgcaaatttgttcagaccagctgttggcgatagtgttggtagacatgtcagaagcattaaatgcacgacagttcattctcctgccgacagacaggaacatgtattctcaagtgatcatgcatctgccaagagtccaagcaactgccccaatgacagctgttccagtgaactggactgtcaatcaaaccacccggattatggtatgtactgctcttcgagctctctgacctgccagcgaacctctgagactggcagacattgcgaaggagacagtcggtgttctgggggcaattgttcgagtggagagtgtatgactgtcgcagagaactcgcgttttctgcagggctctgagtgtccttctggcatgcagtgtcgtccgactcattttcattggtctggagcttctaatgtggagatggtctgcatgaaagatgaggatgctcgcggaatacagtgctctgctgaaaggccttgccaagagcatatgccgtgcgttcttcggcatgagactagcacgtactgtgagtggaatggtacttgtgggctgaatactatgagctgtgagtcgggcagtcaatgctgctctggattttgcaaggccaacttatgccagtgatagtctttgcggaagatgtcaagcttggaggaaatggtatttgaattgagataaaggctgaatcttagctcggcttatgcaacaaatttgtttgaaagttactcctttcggggacacagccgctgaattctttccaatgcatactctcgaatttcgcggacaatatcttctgcaggtttcacaccatgtatcagtcccacagaggctcctgcatatgtcgcaagtctcccctcaggcccccagccgttatcgcccgtcttagcagcctcatcatgaagtcttctcagttcctcgaagggcttcccttcctgccgctcaacaaatgatttgttcacgatagtccggggactatattgctccggccacccgaaagtgcctcggaggtgattatatagtagcgtacgcgtggttgaggccgcaccatcgaccgcacgtacaacctcgtcctggtagccctggctaatgcgtgcttcactagcagccaggaatcgagtccccatcaccacgcccgaagctccaaggcacaaagccgctgcaacaccgcgcccatctgcgattccgccagctgcaaacaaaggaatttggctgcctgacatggcatctgccacttcgggaaacagtgccataagccccattccgtctttcgcccgaccatggccaccagattcagctccttgcaggacaatgacatctggtcgctcactgttcagaagaagctccttcgcctccttcagagtgccaatttgaatccagatttgggtgtcaggggatacttggcggatcttgcgagaccagtcgtcgtattccttgggtccctggcgtggagcgtatagccaggctgcacatggtttatacttttcgatagcggcgacggcaacattgatgtcgtcagcccagagctggtatcctatgccgacaggcagtgtcgagccgggagttggttttatgccggcctcttggtgtatgagcgatgatgctttctcgagatcatcacttgtatcctgtgttttggcaccggggccaatgaaccctagcccaccagcgcgagagacggctactgccaatgctggaccggacattactttcataggtgcgctgaccacgaatggagtagatacccatgggtatcgcgatagcaagcttgccgccatagtttgatgcttgggatagttggtagatattgctatttggataatatggcagtgagagcggtagttgtgtggtgccttgcgttttgtagttgccgaggaatcgttgacgtcaccatagaaaccccacaatgtccgcatacaaaacaaacaccaaatgtggctggaggaagttgcaaggcctcgggcatcacatgccattcccgcaatatccgcaatatccactgcccactcattccatccgtgataccctacttatcccattccactcggaaattgcgggatctctatcctgcttattgttcgaagatatgccacactccgacctcaagcgaatgcgcactagagttgcctgttacccatgccgggagcgtaaaagaaaatgcgatggcgctgaaccttgtgaaacttgcagtcaatggggctatgattgccactacaaacgtcagtcacgacagaggaaccatcctccccaacaaccacagagagaaattggtccagatccaaggcctccacagcaaaccgactcggttgatacacacgggctggatcgtcggttgtgggcaaactccggtgctgcgtttgttcggaggatgggtctgaatatcgatcctgcgaaagcgccaaaacttagccttttcggttggaatattggaaagcgacaactgtcgtctgaatctcaagctgtatatcctgtgctgtcaattacggatatcacatcattggaacacatgaggaccctcgctcaggtctacttcaccaagattgctccatactatggctttattgattcttctcaattttttgagcgactggaggctaggtggcagtctcccatgattagtagtctatatgacagtgttctaggtggggtcgctgcactaggttgtttgcattcccaacgaaacatgaccatcaccgagttgcatctcatcgcatccgcacaatctattctcgactctcacgttctgtgtggggctccccccgtagaccttctcgttgggtggacattgcgagtcgtctatatgcgaatgacagatctgcctcactcaacatggatggcgagctcgaagttgatgcatttggtggaagctgcaggattccatctagagtctactgattcagtctttccgcgtagtattgacacggagtttgatccagacatccaaaggcgactcttcggcgtggcactacacctgaatatgtggacttcttatgatcttggtttatcaagagtgtcctttcgaaagaatgatctgccattactcccatcaactatcgagggtgactacacgcatgagctgctggggcttattccattatcggcaagcctagatccaggaaagccaaaagaagatgatatcaagctagaagaaacgcttgtgcagatactagaaagagtccataatgagcctccctcggccatggcgcaatgcaatcttgtgctttgcattctgcgcagaattcacacagagaaacttgagatctctcctctcctcgcagaaaaagccttagcggtgctggaaaagggactttcttgctcacgcactatggtcgcgaactgcactccctggcaacatatggcaaatgtacctttccacatcatatgtctcttgcttgtgatggacacacgccaatcgctagcgctactccccgaagcaatgcagacactgaagttcgtcgcctccacttacgatacaaaaaccttgagagaagcctggagtgcggctctcttgctggttatgcttcatcaacaacggaggaaagatgatattgcgatcttcaatgacatcatgaacatggaggaacaagaacgtccagctggactatccccgcaagaatttccaagcgcggaagagtactcatggctaggggctttggttgctgatctacccggtttgcaaagggatgaccttgatcaatttctgaattcggatatgattgatagttcaagtttcttgggtggagctagatgaaccctacctagaggcacttaagtttttgagacatatctaattctgtgtgaacattgtcttgcctcattttagaccttgtaatttagttttgctttgaagttccacatggtacaaagccttgcggaaattgcgggcgccttgctgtgcctggctggtaaaattctctgttccgcaatacccgcttctatacattgggagatcaaaaagctgtttgaacaaaaacatgcacacccattatttattagtgttcataacccaatattccaccacagtacaggaagctcggcctgaattcagcatacctggacatccaaccatcaagctcatcgacagaacgtgtctgcacgtcgctactctatcaagtccaaaatgcatgagaagacactgataggagccaataacgcacttccgccagctctttccaacacagtaagctatgttgattttgaaggaaccgatgaccccgagcatcctcagaattggagattgtctacaaagtaagccacaagtccaaatcagccaaagatctggatattctgaatgcaaactaaccacattcaggatttttaactctacactagtctgctcaggcaccttcatcgtctcactaacaagcgccatcttcgcaccgggaatcgacaaagcaagcaaagcgttcggggtcgggacagaggtcggaacactgggaacaaccctctacgtccttggctttgccacaggacccctcatatgggcacctgcatcagagctacggggaaggaaatggcctctgacaatttcaatgttaggcggtggaatcttcactattgcatcagcagtggccaaaaacatccagaccctgatcatatgccgtttcttcgctggcatgtttggcgcaagccaattgactgttgttcccgctgtattagccgatctatatagtaacgctactcgtggtgctgcaatttcgctgtacgccctgaccgttttcgtggggccgtttacggctccttttgtgggtggcttcattgcgtcgagttatcttggctggcggtggactctttatatcccggcaattttcagcctgtcaattgcgctattgagttgtttctttttggctgagacatatccggcttctattctcgtgacgaaggctactgctatccgcaaagagtcccgaaatcgcaatattcgtgccagacatgaggatgtcgaggtcagcatcgcagatctcgtggagaaatacttcacacttcctttgaagctgctcttcacagagcctattattctcgtcgtgtcaacttacatgtctttcatctacggcattgtctatgcgcttcttgaggcatatccctacgtcttcgagcatgttcacggaatgactcctgcttttgctggtctaatgtttattggcctcatcattggcgtggtacttgcatgttcctttattcttttcggacagttggcctatgcaaggagactggcagagaataaaggcatcccagtgcccgagtggcgcctcgctccaccactcttaggagcgcctgtctttacaataggtctcttctggtgagtagaatgattttctattagaatgatgtatgatgtcagctaactgtccatcaggtttggctggacggggttcacccctcagattcactgggttgtacctgccgcagccgggatattcatcggcttcggtgtgctgtgcatatttcttccatgcttcaactatctcgtcgatgcatatttgccaatgtaagttcttggcccctctacttgaagtagtcaagacactctgctaacctgaattgtagcgctgcttcagctgtcgctgccaacatcattcttcggtcagcagtagctgcgggctttccgttattcgcgaggcagatgtttcaaaatatgggaattcaatgggctagcacgctacttggatgtttagccgcaatcatgattcccattccgatcatattcagggtttatggaccatggctgcgaggaaaaagcaaaatatttgcataaaagtgccataacctggattttgaatgaggtgactttgtgggttctttccgtatggacaggtcacagtgagccacagctgctgccaggccgaaaagcatatatagtgtgttgataagagttgaaatgcttcatttacatattctcaaggtccaaaaaggttcgcactcatcttaaaagctcgatcgagctttagctctaagtgatcgtcccaaagtaaacaagcgctaatggagccgataccaacccaatgatggcgatcacgctgttgcccgatccataaccaagaacttcgtacatattgggcgtagatagcttcattctaattcagtattttaatttctgtcagttaaaataaggcatagttattacggcatattaaggcatcagctctacaaaatcaggcattcggccactgaccgctatacaccttcgcacgccactaagctgctttaggcttcagcagttctgatgacgtggattgcgtcgtagcagcttcggagaaaagaaattcatgtggatatctttcattattatgtaaattgagagcaggagggacgaaaaatgtgataacattggaaaataatacaaacgaactgctcccctgagctctgttcacatggagactacaattatgatattgaacaaactcaattagtttacttcaagagtcgcaatcctgtataggggctctctccgctcattcgaggttattgtcgatcgaactgtccacggcccatccattgagcatagtgtagtcggagtatggcgaggtgccgtgcagggtttcatagtgcttgcgaggcccacactctctcaacttggcagagtctgcgttgacgcaccgcttctgcatgatagccgcgatctgtcgacccgcatcctgtccttcatagtatgcaccgtgaaggaagccaaagaaggtcgggctggtagcctcaccggcaaaccagagccggccagcgttggcacgaaggttctgatgcatctccaaagatgtggaaggaggccagttggagtaactgccgtaagcccagggctctgaggtccagcgtgggtacatgaatgcagttggctcgggaatatccttctccgggaacatcttgcgcagaactgccattgcttcctgcttggtctgctcgtctgtttggcgctcggcccgataggcaaactcgttggtcacggtcacgaaaatgatgttagaatccgggaggaatccgggagtagatagtgactgccagatcgggtaccagccacgggtcacaggatcagcatagaggtggtattgtgtttccgagggccagaaggtctcgttgaactggaagaagatcttggtgtatgttcccatggtgaacttctgaatagcttcctgcttccaatcggggagttctggggagaagttcactgcgccattttgcagaactcccagcgagaatgtggtaatagcatagtctgcctcaacgcagctgccatctttgttgtgaacagtgacaccatcgtccgaatacgtgatgttcgtgacctcggtgttcaaatgaaggcgggtatcattgcgagtgaggaaagtcgaggcgagcttcttaacaatgatattgaatccgcgctggtccaaaacaaactcatcgtggtcgctgaaatagttgaaggtcaaattgttgcccgcacagccgaagacaaatgagctctctattggggagtaagcagcctcaaagtctagtcaaagatgttaatatcgcgctagttgcatctgcaagagagataacttaccccacgaccaccagtcagcagcctgtgcctccatatcatgtaccttggggttccaaccagccaaggccatgccagacttgacgttttgatcctggagattctgagtaagaatctcacctgccctctggttggcaatatcataggcgtcgtcataggcatcgaggagatcgctatagtcagaataaccatccttgttgtaggtagagacattgtcataatttgcccattcggtggtcaatccgtattttttagcctgtccgaggtcagttcgtgtccgatcgaaggtatgttcaagacttaccaagccccagatcgggttctgtggacctccttccctgccaataccttgtacctgtttgacctgtcagcggtgtcctttcctgtagctgaaacatgcatacccaattggcacccatctcaatagtataaggcttcccatctttgtcttcaccgaacgacttgtgccaagcccgaccgccgatagtatcgcgatactcgagaatcacgaaatcgtgcacggaagcattcgttagggcttgctatgaaattgtcagtgatagtccaagataaagcaaaggggaaacctacagcagcagtaataccagccacaccacctcccctatacttggtgagcttttgacatcgatcaataagaagtccagcacttacaagattgcaaccttagtcttcttgcacgttccctcagctcgagtgcgatgaggcgcaccgatagcaggctggatagcgcctgctatcgcgaccaaaaacgaaaggtgctgtaaatgcatggcgaagctctggagatcgcaaaacagccccggggatcgattgcaataaataatgcagaaatcgaccccacacagggctgtacctgcacatccagagaaagataagaagccgactccacgcagccacgcgacccgggaactccgacttcctcacaccttccgcaatcgggcaagtacatgcgggaagctaagagaagcctaatttaaagcgatataggtatctgcggggaggccttcaatatcctccgttttgtgatttaatcatctctaatctcattcctattacgtttggaatgctgaaattagcctggtccgtccatgtggatattcctaagtatcagatatactcgcgttcaacccggaatcttcgagataccctaatcgataacaaccaggggctactcgagccccgattgtcatccaatgtgctcatgatatcgaatatcgtcggagtacgatatcagttccgctaaaatggtgcacaggcaaggaaccatattcgacaattagtcccggcactgtagcctcggcagtcatacgtacctggaatggctcgaaagccgtgtagctctgtgaacatgcaattgaattgtttcaggcaatgtccccggatgatcgtcgtaaatgactctttgaaaaggctgcaggaaagactattgcttccactaaggacttcatgctcacctcggcgatttgagataatctagcaagctccggaaggtcgttggcagatagagttcgtactattgttgctgaggttgtttcaccgatgatcaatccgagctgttggccaacagaataggcagtaattgttgtctaccttcccacctcgactccgtgccgacaaagctacaaattatgtggtaaataggcccgccattccggttcctgcaaggaacactgggatcagactaagatagttagagctggagcaccagaaaaggagcactgcgaaagagataaccgttattcccaatccaataatagacggttttttatatttcatagttctgattcgatagttagacttagcattcaacttaccgacgaatgaaccgaccatgaataattgagccgagagcgatacctaggggaattgtgaaattacgaggcgggataagcccaacgttggccctgcacaatcaaacataagaaagggaaggttcgaggtgagctatttggttagcggagtagcaacaccatcaaattcccaatcgaaacccgtaggccgcggaggactgcgaattgtaaaagctcctgacaagcgccgtaacgtaacgactgggaagaaaacaataaggaggaacagtcctatgaatgacatgtttgcccattagttcggagatacacaattctcagggatggatggtcccatcgcagccaacactttgattggatcgccgaagcttacccaacgtagaggtaactgaaaggtagcttcgtaataccacaactttgaacggacaaacaagatctccttgtaacccacttcttgtatgcaatggacacggaaaggccgtgtatgatggggaggggggttatctaaagtcacagttagaacaatgaggtgtcatcgcaatagtttccaatgttggctttgagaagtcgaccgctcaagtggcaatcgtggcatcaatgggcatctgtcaggcgcgggtgatctacaagttatctctaaccagcatggcatttgtggtcgagagatttattcgtcatccagtgaatgatcttgtcaaggcagctgagacaaataggaaagccccagtcatttttctcatggtagtgtcaattcgattcacagaggccgagagatgattagtcgagtttgccgatgtctttgattggacatggccgaacacttctgcgcgagttctgagatacttcaattgctgtctcgatgagatcaggttagtttctgatatgtcaaatacataatgagcatgtggtgatgatctgcaaggcccttgagataagtggaatttcctcatttccggagtcccagggcaaccaaaaagaaaacatctttgtccatagatacaaaacacataggacacgtagtcaagacatcaggaaacaaggcagaaggattgcagcagttgatgaccacagatctattccacaagaaatagaaataaaccgaacaagaaaaacaccgccgagctatgcaaacaccgtgtcagatgccatctgacgttttcccgaacgccaaaccagagacaccgaaggttcagatagagagcaccagaagattattctgggctaaagcaaagacaagaagaaaatgatatgcagagaaaatttgctttcagcggaaggcgtaagaagggcgaaccattttcgatacttctggatttagagagagctgctggtaaggcgagcttcctgggtcatagtacaggccttcgatgtgtccgtcctcacggcgaagagaaatgtagtagaatccggaaatagtaagaccttgacgagcatctgttggggtgatgaagcatcgctctacggcatgttagcaaaaaataaaaacatacatgatctttcgctacttacccttccatctcatcaagatccatccttgagacaattcctcggtaatccatttccgattcacaagattccgggccatctcagcatctgtcagatccttaaacggctgcagttcacgccagtatgtgctatcaatgtctgcatctgccttgaagttctttgtcgccagcgtgtgattgttgaaatcgatgatctcgccctccaagaaagtcacaatgtgtgcgtcgtgggtgggcgaggtcttatcgggaatgttgtaggcctccatagtgccggataatgtcatgtcctcgtggttgatctggtgtatcgtgaccttgacaggccaattttcatcacgattgttagctaagtatcggcggccacttgtagtagaaacgctgattcgtgcgctctcacttccatttacaatgacaggctcactgggggcgttcggactagcaatacgctgcgacaatattgaacacccggcacttgcagctctttggcagcctgaaaaggccattccagatcgaagccatgaacactccgcgggtggtgcgatgttgcgagtgtacataatgaagttcgcgtttctccaagatttgctatccatcgagaagggtatccgactgtccaccaagacacgcatactatcttcgagagagtttgaatgccgaatgcgctcgagatagtggatggtctcccctaacacgttgcgcatacttgtgtccgagtgtagctggcgatgagcggcagcccgagcgcgtaggtcgttgtgggtgaggttggtattgtgtgggtcaccgcgcgtcgtaggacggtagcggtatccccgagatgcgaccgctgctgtattttcagcgtcctcctctggagtgatatctgaatagcgatcgatgatgtagttctccagtgtgcgactcctcgaaagccggggctgacgccttgcagattgtaacaaagccgccactgcagagatcgatgtccgagcctggttactacgcggtaacgtcgcagaatcatgcggcatcagttgcgcagggcccagggcctcattgcgcggaggtcgtgcggggggtgggtcacgacttgagatagcactgaggaaaggctgcatctgatcgtcttccgactcttcgcgcgcagcaccatcctcgtcatcagagccgggtgcccatccatacaacgaccgtgagttgggcattcggccctcgtagttcggcatgtcggttgatctctcctggtggcggacaatagggatgcgacggttgagttcaacagacgcgcgcaggttcgtgggatcatccacctccatgcggtcttcgttttgtggtggcggattagtcggataacgacggcgacgttgtcggctcagggagggtaatagcggattgaagagagctggtcgcgatcgcaggaagttcacgttgtcatcgtgagcattatcggtctccacaggggcaggtgtgggaatcgacgatcggcgcggagggtcaggtgccgcggtcgtcggggagagtggcgtgccgtactaaaagatattagttcacaaattatactggggtgggttgcaaggataaaacatactgggttaggaggcggcattctgatcagaatgcgccgtcaaggggtgtgcaggatcgacgttggccatgcaaggccaagagaccaatatatgtgtagcaacaaacaattaagtccggggaaagatgtccacgaatcgcctgagaaagtgtcggatgttgtgcttctaggactttggggatgtggagaggcccgcaacgtatgacgttcttcctttcaaccggctcagggcctctggaagaatccgtggacttcattgaacttcatagggattccaagttgatttttacgtattcttattgaattttatatagctgagagtcaaatcccctgaaagccaagaacgtggagccccctgttctgcaaaacaaacataccaaaatggtgtgatctatataggtcattcaaacccctttaaatgaagaacaagcttacatcgagcttgccatatcctagcgattaaacctgaatggctctccatgttggcaacccgattcttcatttaaagggaaattgcgtttagggggcattggttacctcctattagattgcctgtcgggttgtctacgggccaaataaaggctttgataaacaatgcatatggtcatgagtcagtatctaggtactaagaacaaagaatgaaatttctcggagtacagcttgtgactatttggaaggcaaatcctgatctacagtctccatcaagatattgtcctaaacagtggagctctatgtgcaattgaggatctaaatcacagtctaaatattaaccagaaccctgaaaggatttacagaccatctaaaatgttgcaaatcaggccacgcgtgcagcattgcaatcatcggccagctggacacattgtaggaccatgttccagaaagcatctagatcaacacccctgggaatagcaacacccggaccatcaacaggagtagcgatcgagcgccccagttgacctgtaatagatacatctttcccgtgctttccatcggtgacaatactcaaagcaaaacgctcgccgcctttgtcatcaaaagcgagagtttgattggggtgcacgttggcaaaggctgggttcagcgtcgacaggatcgcggccacagcaaggggatcatgcaatggaggcccggtggtcaaaccaaaggttttctcgtatgtggcagcaaagaaagtgagtagcgcgtgcaatatctgccgaaggatagtaggatcctcggccgagtggatcgagccatacaagatgcgcgtttgaacagcctgtgtggccaagacctgatgtgtgagatctaaagccataatagctgtcttagaagcaagaactgggttgctaaagattgactcagcagactctgggtcacactataataccatcgtgattagacgagccagagaaggatgaaaggttttgcgaacgtacatagaagttgaactcagcccatggggtcacatttccgatcctagccttctcaccaggtagtctactcatgggggcatcggtgaatcctccaccaatggcaccacccataatgctcagcccttggatgtgttcagctacctcggggaatgtggcaaacaacagtgcggcgttggtcaatgtacccgttgcaaccagccaaggagttcctttgggttgtgcaagaagagcatctctcatggccacaatggcgttcttatcggtgatgggtgctctagtggccttgggaagaaggtcagtcccatcaagaccggactcgcctggaaagtgttattaaaacattctgctcctgatatcagcatcaacttaccgtgaatatcaggtgcatgaagagcaggccgtgaaaatggcttattgctaccaggatagacgggaatgtcaggctttccgatcgcttccaagacgctgccggcattggcggttgtcttctctaatgatgcatttccatggacagtactgattccaagaagcttcaaatatgggtgatgagcggcgatcaaaattgcaaaagcatcctgtatcgtattaacaaatgtctctctagaatttctttgatgcttacatcgtggcctaagaacagtcagtaataagaaggcggaaggaacatgatagactgaccaggatcgcaatctaaccacaagggagtaggactatattgattaacttggtctaacatggtggataccttagagcaacaaatggaattgaaaatcaagaggccacttgggctcttaagtacatttggccggacataaacagatccccgcatcaaaggagggagataaggcttatcttgaagccctaagccctatggtcccaattgggtcgatacagattatcaacgcttctaatgtcgaccttactgcttttaacagagaacgcttttttccttgatatgtgttgaaccaactctaaacatctgtgcgatgaaatgaatgatccgctccgccccggccttcagccgatatctcatcttaaggctgggccgacaacctccagctccagatccaccgcgctgccttccccaacgacgcttcagcctccttcgcgtccttcatctcgactccgtacacaaagagatactggcaaggatgatctggactccgttagtgacaaggccaccaccgctctaatccgacgcgttctatgcccccagacaagcagccacggagcatcttccccacagcctccggaagagctgttacctcccctcacgagctccaatgacgttgatcgtcaactctacgcccttctcgccatcataataaaagaatttgtttactcgtggtactcgaagatcacccccgatcaggctcttgtgaatgaggttctacaagtaatcgcgcattgcacgcgtgcactcgagcagaggctgcgccaaatcgacgttgcacaattagccctggatgaaatccctagcctggtggaagcacatgtaatctgtgagacttgaccgttctaaagtccctcttgtcggaatccatagttgttccgagaaacattgctgactatgatcttccagcatacagactggccaggcaacagtcacatctttctggtctaccgacatcataccgtacaatctatcatgagctaaacccacaccctggtctttctccagtacctgatccaggagatccagatacaatcgtcgagcagacagacaacgaagcggtctatcgccgactactcgccaacggtatcctagcagttcttcttccaacggaagatctcgagaacagcagtctccgggcgcttgtggttgatatcatagcagacctcattctaggaaaccaagtcagtggcagggcatgtgaaggatggttcatttgggaaactatgggcaaactcgccgctcaagtgggacaccgtcaaaaccaagatgacacaaaatctgccccggacgctggaaccaatcgactagaaaaattcggcttgctttcaaccgaagatgagcagctcccggaccagccaccggcgtcgttctcggccactgcttggatatggaaccttctgcagacggtttatcttggttatgtcgtcttgcgtttcattgcgataggcttatttcgtgttgcatcgagtccaggcccttcttcgcacggtgttggtgtttcacctgccttacccatcgaccaaaaaagagatgggatggagtcgtccgatggcatcacacgtaggcggccggttctcgactaccggatgtatgccatgatttcgcagatcctgggactctcatggagaatgccatggctgagtggattgcttgccctatcccaataccttattttggcaggcccaggcagggtcggcgctacggacggaatcttagataggtaagttcttgttctattttctttttctttttttttctcagtctgctgcttctctctgcaacccctcaacgccccaacactcgagggctcaggccttgggaatcaaagactgtggagcaacggtacgatctccgaaacgcaatctacgggtcaagtgtcacttgtgcgagtcaaggtgggacatgaagcctcttgctcgcatgctgcgtcggtcacttgatctgtaaccttggaaggctgcaattacctgtgcgagggattacggtcatcttacgaccttacgagatctccttactgtacggtcattaccgtcagtcttaccaggctgttctggcataggattggttgccctcaaattggcccgagcgacttgaatttgtcaatcagggatgtctgtgggctgcccgcggatgccccgtctctgaatctcctttgagacagaaaaatcctttgtgtgtgatagcgccggggcccggccctttccgtaccgctcgtccacttttgtgttggaaatcttgacgattgcaacatctgccaactttcaaagcgcttggtttaccaaacaaagaaatgacatcgcatcctggcaagaatcgtgcaccagcaaaaaagagaaagaaaatgcaaaaaggaaaatggggccgatcacccatcggtgaaagtgaactaaggcctcttttggcgcaaaaagaaaaaaagaaacagccccagtcgaggctagtgaattactggattcggcccaatgagcgaaattcctgtcgggaaggattggaatttgtaagctgaccgaggttggagcataagcccgcttgtgctccaggtacggagaacgctgccgggatgttacccgctgaagaggtctttttctctttgacgtgcgagaaaatgatatcccagtccttgtcctggcccaagctccttcatctctgcctaggccgatcatgctccgcctcacccccactccatacggccaatcctgatttgatggcaacttcgacttttccttaactaaacatgtgcgagaaggggaaaaagccacaacgtcccggggagctccacagtcgagattctttcttcacttttttttcaattaatttattatcttttttgggaatttgctcaattgctccgacgtcatgacttgagagagacctttgctaactgctacagattcctccgggagactatcgaggagtacgtgctgacccccactttgttgcccaaccttcttattgtaacaaggaccgccttgttcccggccaatacccgtccaatatctcagatagcggctgggaatattgaagctccgtcctcggctctgcagtcggtgcagacctcgacgcccactcagcaagccttcgcacccacggtctcaaatactcctattgtggaaggagtcaggggccctgatgccggtatctctaataaaaccaataatgcgggtaacagcagcaacggcggcaataatgggaggggtacctcaacatccacctcaggccgccaatcgtcactttctgccattgcagccgatgtcccaacaccatcagagctaaatgacccggccgaaaccgtaaaaaggaacggcccatctaggacggagatcgccgctatcaagcgacgatgtgcagctagtctcctggccgttatcccgcgctccgtcgtacgaactttccttggtgttccctcgtcggcgcctccaccgcattacagtagtgatggtacctgcagcaccaacagtttgccccatctcgttacgtcgtccccaccaactcccccaagggcgccccatgaatctttccaggaggggaaggaaaatctggcgccgtcgcattcgcatttgccttcggacccctgtccacttgcatgtggtcaacttgccgctgagcggctgcgcacagacgatgatccgtctgcggggattgatcgcgaggaattacatctcctagacacaatcgagaaagactttctagacctctttgcagatgagtactgcaataaacatctagtctggagcattatcgagacagttctggccaaggtactccctgaaatggctgagcgcagtgttgaagatttactggaggatcgtgggatagcgtcagtgccgcctgcatttgtatagagtacatatagtttgcggctttgttattatcagcagaccttaattgatgagatatgccttatgactagcataacttccaaactcaaaaatagtgtgattgtagaaagatatcgggggtataatagagaaaattaatctgacatggttcatctataggcgaaccagaaaatttcatgtcctttccgcgtgagcagcccagttttttagaaaaaagaaagggaagaaaattggtatgaaaagagcgtaagaaagagattcagtacaatgtactccgtaggagatcaaggagaacagaatgctagagaaaacaaatgacagggggggatatagaaaaccaacagcaaaagaaaaaaagcaaaaaacccgaagaagaaagcaagcggtaaaactcccgagtccaagtccgaggccgatgatcccaaatccgtataccatcacaaattgccatttgtccattattccatatgcatcgtccagactgggaataccagggtatgtgtgcgcctataaaatccatcacccaaaaaagttccaaaggaaagtagaggtcgccctctggatatgtgtatgtttttgtttggttgcccaggttttatatctcgttgccatcgcggactagagaaataagaaatggatataaagaaaggttccgtacaagtgatcaaaaaaaaagaataacagagtagcaaaagcactagatgaaggaaaggaagaagagaatggggaatcacgaatcaaagtaaagcagataatgttagagggggaaggagggaatgcctcaagaagaaatgaaactagcagtgcacaaagacagtgggggaataatcataaaaaaagagacaagaaatgcaaaatccaacttgcgcaaggactcatcccaaattgtggatgctccgcttcttcgtcacatgcgggatatgaatatcctcatgttcatcaatgcgcggcaagccactcaacagaaagccagcctggctcctggcaagttcaagcctctccattagctttacgatggtcatgtactcctgtgccgccagaccagcaggctgatggtcgaagtagttgatgacgagttcaagggcgcgacgggcctcgtcctgcgtcggtgatcctggagagctgacgggcgagatggtggtagactttgaccgcggcggcatgtacttggtcgtgatctcagggttgctgcgattgcgcttgatgacgtttgtctggcggaccgggaacatggcgggcttggagtcgtccatttctagtggggattgcagggtggagaccgtaagagattgctggagttcgcgcttttggcgatgcgggtctgtggtgtcatcggctgataggagggttggatcaatggggacgggaggggaggtctggctgtgcagtcggttggtgtcgctgttggtgaacgggagacgggattggctcgttggtgttgttgggctgaccatacccgccgaagaagtgtcgagtgaggttgtgctgttggaatatccgtgttggtatccccctgtcagatcgggcagttcagccatgtcgtgtttgtttctttcttggctcgttggggacaatggggatccaaagctatcaatggaggatgtgggcgagtggctgccagggcttcgaagagcagacccgaactctgtattgagctgaattgggctgtttgaacagctacgaattccggtagatcctctgcgcatctttgcgccgaggagattgttcttctgcttgaatttttctagccaggctgcagtggagaccttttccttgccttcagggcagccgcagatactggcgaagaaaagtgctttctctttgatcatctcatcgcttaggggatgtccttggctgtggaggttctttgcccagttggatagagctctctcaatatcggggactctgcccttagcccgtttgataggagaccgactcccatcttcagggtttagatacttttccttctggcgaaggactttggaaacagtgctgtatatgttagattgaatcaaataaaaagcgaggtcgaaatgataccttctctcgactccaaacaacgctgcacatcaaagtcaacctagttcctgaacacagacaaaagagataatgcttacctccaatatcagtctgctttgcagtcttgttttcctcatgatatatacacatttgccggcgatcatcgtcggtaagtgtcctgcgcggcgtagtccctccagtggaggtctttcgcaccggacacatggtagccgaaggtgacaccgatgtcggggtggtagaagcaggtaatccagacgcaacaaacggagagtgtgtcgtgagcatgctaggccaggaatgcgaaggcatgggtaggggcatggaggcgtagggcggcggaactgacatgccatacgagtccacagccatgagctgcgatgagccgtagtcgaacccactatattcgtgcatggggggcgagtgctgaggagaagcaaatgagcctatctccacccacggcgaatgggggaattcgctctctggctcatgatgagtctccgtttccatggcgggctcctccatggacaatggatctcaagaacaatggaggtagggctttttttggtggggttttggttttcgtgataggctcgaatcgggaggaaatcaaagaaagagagacaaacgagatctcgggaaacaatgaaacaatctaagtgtgagacaataaaagctgatgcatgttccactgcttccgtagacctatatagaattgctctgatagagagtattgtcccgagaaggtagctctatagaccacctaagtgaagtagaagggaagtgtataaagtatacaatctgcaagaaggtaaaagagcatgcgagtaaggcaatgggggttaaaaggaaaattccttggacgatcatatcgcgtggatttgacagaacgacagtgaatatcaattgcaactggcacgagaaagaccaccggaaaaagccatgataacctttccccccgagagttatccagcaacccggttggtgattggtcaatacagtgaaaagttccaaccaaaataataaaaaaatataaaaaaaatataagaatagccagaataatatctcgattttaatatttgctcaatttcaaaatcatccctgtaaatagaggaggaacggcgtctggttggttggccgtgcgatatattgcggcaggggttgcatctcgtcaggcccaatgcgtctggcgtattacggtgtaaaggtatggaaatcttcgttctcagggctaacgcggtttgttcttgttttttttgggatttgtgggatcttttttttttcttcttttcattctcccgtatgaccttccaaccaggatggcagactcgacggtaccgagtacatatgtatgttatatactggcaatataacctggcgctagctcatgttgtaaaatagagatgcaacagcgcgaaaccttgaccaatgtctgaatatctagttggtccctcactgtggctggccgttgtcggcctcgccttgacgaggctgagggtctcatctcaagaaacttgggttaaatcagggttgatcatccggagaaggacggggttcgttcaaagggtagcccagtttgtagctcgatttgctgggagccgggtagcggatcgttgaaccgctcaacctaaagcccgcttgacatccatgcacatcgtatgcgagaacggcgatcagagtggaccgggaagaggatagcggcaggcaaactattgattctgcttccgtgaaaagaatcttcattgggaatatcttcattttggccaaaaagcaaaccgttgaatcggagactcaacattcagattcctgtccctatagggtatattgcgaggcaaggttccgactgtggaggtgaccaacccggatccgggggtcttaatctccagtaaacacaaatcataaggtgaagtagaccgagagagagagcaaatccacatggaatagattgcacggattgaacagagtccatacaacgagggaaatattaccagactggggcagaattatgtgggcaggcggatcctaaccttgggagttcggaatatcgaccgcatcagacatccacgagagctgacacggctagaaatgaggaagtgagcaataggccgatcgttgggtggacgaatctgctgtctccgttgccatgctgttgatacgacggggttcatccaatacaagggccgaacagcaggttggatagtggtccaatcaccgggcgtagaaggcatctcttggctgtgaaaaagaggggaacctctcccccatttgccatgcggtttcggcgctaaaatccagccctcgtctttctccactacgacccactgcggtcccctccggcccgggaaccttcaccatttccttgcatcttgcatgttgaacattgtccaattgggaaggtaagggctagaaacagagagcagatacagactatagagagtatagagaatatagcagttggggaaggagtgtagttgactatcaaggtggtaccaaggaccgtaggacggcgggcttctacaacatataatacgctctactatagaacaggtattctcatttgagcggtctaggtagatggatactacccaaatatccagcaagaccccgcttgttcgacttaaccacgaggaagccgaatgtgaaatcagcctgctttatttgggcacttggaaggattcgttctcgaaacctgccgggatggaatgcgtctggaagacagataacgtagcaaaagcaaagcaaaaggtgactagggaggtctgacaaattaatcccaacactgaagaggacttcaattggtacggagtactctcgcttatttggtcgcagtaccaatcattatgcttgctgccgtcggattctttgctttgcaccagttaaatgagcggaaacaaaagaaatgtgtgacaaaattcagaggattttaattctaccacggattttaattagacggaaatcgcgtcgctagtaataatcgggtttttaaggaaaattcggggtagatccagctggcctgacgccattggagaggttttccgatctttttagggcaagggcattactcttcattattcccactactatgtcggagaaggagcaggaacaagtctagaccggtcaacattgaaatcctcaggccaattcgtatctttgcttcttgcaattggatctgtcattcttggctgtcattttcaagcttcgggagaaattatctgttaccctcggggtacacaaccgtagggtaacaagggtcagtgttacttgagtcaggtaccgatggatatacctgttgcaattccaatcctgcccgagatatctccggaaagtcgaattgtgcaaaataaatagaactgtgtatagaaaatcaatggtggatataggggaatatggcatggataaatactactctcgcttgaggtatgtgagtaacacacactagtagctagcaagatactttgtactccgtataccatacaaggctaaggaaaatagagtaagaatgcttcgctactctggggaagagcatggctcatgcaatgcaatgcgacggggatgtccgatggatcctccacgagatcacaacgtacgttataggctacacgggcggtcggtgccctcatagtcacctgatgaagaggttaagtatacataatccgtacaccctcgtacgccgatcgtgcatctgagaacagaccagatcgtgaacagcccctttctcgttttcactgaatcggcgatatgcggtctccacctcactagaactattttgtgtcgccgcagagattcacgagaactactcagtagcgtactagacttagtagacaccataagaaccccctgttgggtaaagtcatggacttcgtactcgtaatactgtgtattggataggaatcgatcagataaacgtccgcaattcaaccaatatgtctctcattcaccgcttgttcttagaatcatttgtaccttgcctcactttttgcttttttctgtttggttgaaatagtttggttaatttgcatttcgatcctgcgcagatctgtactccccccccccccccccccccccccacccccacagcgccnnnnnnnnnnnnnnnnnnnnnnnnnnnnnnnnnnnnnnnnnnnnnnnnnnnnnnnnnnnnnnnnnnnnnnnnnnnnnnnnnnnnnnnnnnnnnnnnnnnnnnnnnnnnnnnngcggaaaaattttccccccccccccccccctcaatgtcggaaagtagttgcaggccagcagccaagagattagaagctaagagattggaaaaacgtgctagtcagttgacagatccattttgatcttccccctatcattctcgagcaatatactcccttgagcctatcggaagccagactagcattgccgggtttatttcacatgtaatggttaaccgaaactcttgtggctttcgaatactacacgaaactttgtcatgctcgttaagctattagcattaggtcaatgcgttgtgtcgcggcccttctcttcacggaagtatagtatgcacaccataattgccttcccggctcttccgtcgaggctatcaacttcgttttttaccggggcttttaagctggcagctatcccatatagagactatgatcggcattaggcctaggcctttcggggactgactcgtcggcctcgaaagtaaaaaaattgggagacaagaagcaatgcgaacaaagaaatcaagccacaggcggagatcttataaatattagaattactagcaaggatgtttgcggcacgggaagtaatggcaaggggaacatgccaatcggaatgtcatcaaaataaattgttatgcagacatcctcggatctgtacatggtagggtctgttaggtccgggggcgataaggagtcgcatgatgccacatcaatcttctattccgtactgaagtagcacgacttggctaggaactgattggtctgacatcatcaatcctttatacggagtatgagaacgcaatttgtggctttcatcaggttggaacagtaggtgaaaacgagcagactgctttgttgtatattggcttttatttccacacaaccataaaatatttgaacttttgcgctcatgaaaaaaatggataatcataacaatatggactggtcgcttcaaagggccagaattcccaaaggtgccaagaatatcagaaagacccaatggccgttcgcctcgtgcgtgcccctgggctggtgtaacccctgaagcctaactcgagctcatcaaatcaagtcaagctatacctcaagacgcaagaccaaaatcagcaaggctatgcatgactgccgattttgatgtccaaaggtagactcaagactttcccctaattatcttgccgtgaacgagtctatccaaccacgctcggatccggtggcgtacggatgtctcagaaacctgtcagatcgcggaggcgtaaagacatgctggcacagaccaccccagcgcttggatcatctcgccgcttcgggctatgagtgtcaaggagttggcataaatcctttacctcttgacgatcgacactgtagctggtcagctttgaaattcatgttgagttttgttcttttttttggtatatttaccgatatcttcatcaccaagctcgtgggaaagacccactcgctgcggctgatgcttcactgagcggccatacacgatagcatgcttgaaatcgtccttgattgtgcggtgaatagcgtcacactgtttcgttagtatgattcttagaaagatgagggcaacgcttacgaaattctcgactgtgcatgcataagaacgcagcacaacaggtgctgaatagtcgggcgctctgcccttaggcttcgtgtagattctgcgcagcttgagcttctcccacatcatctccatcagctcgtcgatattccatccatgctccgagctaattgggcaggcgtctggaatccggtacagcaaatccaactcttggatggaaatagcgtcgatcttgttcagcgcataaatgacagggatgtagctgcggctcttggcttccaagacatcaatcaggtcgtcaatggtggcatcacaccggatggagatatcagcggacgaaatcttatactcgctcattacagctttgatttcctgggatctgttaatactcatcaaagaccaaagactctctgggagatcaacttacgtcgttgtcaatatgagtcaatggctgagtgctcgtgatggcaataccacccttgtccttcttcttgaagacaatgttgggaggcttcttattgatgcgaatgccaaagccctccaattcattctcgataactcgcttgtcaaccaatggcttgttcacgtcaaggacgatgaaaatgagattgcaagtcttggccaccgcaataacctgtcgaccacgacccttgccgtctttggcaccttcgataatacctggaagatcgagcatctgaatcttggcgccattgtacatcacttgaccggggacagttgtgagggttgtgaactcgtaggccgcggctagatgggcgttagagaaatcggttgtcaaggagggtctttacgaaccttctgaatgttgaccagtcagtttattcatcagtgtactcttgccgacggacgggaaaccaatgaagccactgcacttgtaagcgtatgcgatcgcaaatcttctcgggtaacttacacactggccacaccagtacgcgccacatcgaagccagctaatctcaagttagcacttagcagagtgttcagatctagaatactcacatccaccaccgccaccacctccagttggggtcagaagttcacgcttgagcttagcaagcttcgccttcagttgtcctgcatattgtcagaagacgtcatcggtgaaaagtcgtcggtgtgcgcgtacccaaatggtaagaggtgttcttgttcttttgagtccgagccatttcggactcgacctccttgatctgtacaaaatcattgttagtaatttgtttgatgctatgctcaaaaatctttgaccgcactcaccttttcaatagtggtcgacattttggcgatttgacccagcaatcaaaaatgaatcgaagaaaagattggaaatcctagtaccgagggactcgatatatgtcccttaacagccagcgagttgagcgacaagttttgaagaaatacacttgcgacccgtggacaatcttgtggcaccgcagtttttagtcagggcggggtgtgcgcctaaggcgacgagggcaagtatgtcatttccagcctgaggcatcatttcttatcgctatcgccaaattgcaacttgggcaactacatacctccagggctaggtaggtactgtggacattgaattactctacttggcctcaaatttcataatgaaaatacacggcttgtgtatactcatatcctagtttgtatctcgctgtggtggaccctcgatttcgtcattcggccaacttccgataccgcttctttgctacatagactttatcccaaacgcgcccagcacaacgctcattcaatatgccattcctcaacgggtctgagttgatcaccgagaaacctgcctttgagaagctcgtggaggaccttagttctgcgctgggtccaagttcgggtctggattctagcgatgtcgatcccatggagatacagctgttgatggagaaatacgtctcgaattcggatgaatgggcttcatatgcattaggtgatgcgagtaggacatacacaaggaatctgattgatgagggaaacggcaagagtaatttggtatggaaaatgtctccctccaaatgattacttgactaactcgttcagctgattcttgtatggagccctggaaaaggaagtacaattcatgaccatgccaacgcacactgcgtgatgaaggtattttttttttaattcgatacatgagtagaagctgatttgaaacaggtcctcaagggcagattgcaagaagatctatactcatggcccgaccaagagcagatcgagaatggccgaagctcaccacctcagctcatcaagcagacaacctacagcgaaaaccaggtcacctacatgtccgacaagcttggtttgcatcgggtatccaatccggaccaggacaactttgctatctcactccatcgtatgttctctcgtgtcgaaatgaacagaatccagactaattgatcagtttatacaccacccaacgccgcaatccatggatgtcgcatttacgatgaacgaactggcaaggccatgcacatcaagcagaccaactattattcgttccgcggtcagcggctcgatgatggacagaagtagtcttgtcgatgcccgttatcaataacgctcattgtggggtgtttaccttgtacattacctaagtttgccgaagtcatagcccctaatttggtagctgagactgttcccttcggatacccctcttgtactttatgttcaattacatattcttctccggcttttattcattattgaaaggcgttctgcggcgtgattggcaaaggaaatcttatttctggcatgtcatttactgggacttcttggatttctgtaattttttttttttgcttttggtcataactctattcagattcagaagaacagccactcatatgtaggcccgcttgctctacatgaaagcctcaacattcagctctagagtactgactgggtacttcaactcgtacttctcgagcacggtagggtgcagaataccgaaggagccaatgacctggtccttgccaccaatacagacgtggatggaagcagcgtggccggggaagtaagtgggatctacactgttagcgaatttcttagtctgtttcgaggaggtacacaccgtctagttccttgatataatacgagtcgcccgtaggggtctcgccctcgacgaggaagttggtcttaagcatggccatgatacgatcaagaagaccgtggacaatttcaaacccgctagttttaccatagaaggcagcagcaaagtgtctctcgttgcggctcttgcgctccagggacagatccttaaaggcaacatcgctgacctcgaatattttcatgggaacagagtggtgcttgttctcacggatggtcttgagcagacccgggagcaggctggtacggaccacctggaactcaagggtcttggggttagccagcttgacagcggtgtttccgtcatccttgcggttcagccagccaaagttctcatcatgcgagcacagaatcaacggtaacacctctgaccaaccggccatggcagtctccacacgaacaatgtcggaaagcttgttgatagggagaggttgggcgactgtgccagagatgttggggaacgcacggggcagcgagttgaaaccgtaggcaatggccacatcctccatgatatcacactggtggagtacatcggcacgggttggggggatttccacattgatgatgtctgagacagtggtagaaggcttggcgcggaaggccatctttgtgagaagagtacagatctctgccgggctgaggctcaagccacagcactggttgatgtacgagacttcagcctgagcgatgcggggagagatgtcaggggtgacgcgagtctccccgttatgctcagacacaatctggacaggctcgatggtgaacggctccaacgtatattgggagaacatggtgaccatcatcttgttcacaatatccagctttgtcttatcgagagctgtgatctcaattaaaacattggtggtgttcaggttgatcttcgagtgatcgccgttgataatgggtggcagagagcaaacagtccggtcggagtcgtagatgactggatagactggagagtcacgaatgatgtgtaggtacttgcccaactgttggtgcttctcgtagaagttcatcaattcctcgccatccatctcctgggtctggttcaatgggacaaacttgatatccttgggagggagagcctcataagtgaaggggcccttcacggtgtccaaatcatgggtaccgattgatacaagggttcgttgccgggccaagttctggtggagcttgtcttggagagcaatgaaagacgcataacgagcctggtcgaacttgatgttccgtagaatagcgccagctacgtagggtctgattttcgtggtctattttgatcagcggagcccttccacctgagcagagtaggtgttgaagtactaacatcttccttgacaataatccgctccatctgtgctggctgagtcaagttgtactcgggcaggggtttctgacccaggaagatgttcaacatgagcgcaatgccctcgaagcacagcaagtcatatctgatctcttcttagtctaggttctttcatttgttctcctcggatgtcacgcgtaccggttggcggggatctcaatcttgagttgcggaggttcttgctttccatcgacgatagggcggtctgagtttgtagtctgaaaagatcagtattggctatgtgtggtcgggtcttggagaatgtacatcttcgtcgagctcgattcctattcaaagtcagtcatgcccggcaagaatttcccagccaacctaccaaattcgaaacacagctcatcaaactcctccgtggtgtaactgcagcaaggtcagtagagttcaatgacaaagtccagagacgtactctcggcccaactcttggaaaagagcggccttgtcgaccgagatggtgggcatggtgggggttgctgattctggtgtcaatcagcgaaatgtccgataaatcaatgcggaaaccaagtaggcgactccgacagaatataaggaaagcccgtacagaaatccaggaagtagtgatcggtgcacaaagtattggatgactcttgcgctggtggaaattctgcccgcaagccaccaccgccacagatccccctcttttgtgacgatggtattggtatagtaattcccctccatattcaaatgtttgtgcgtacaccgccagtatgtaatttacaccagtaaacactcaaagctcgactgccctgctctggttgctgcatcatcgaagggggcttttttccttttctctttacgaatttgtatcaaatctattaatttgctgatcaaggtactcattcaattctcgaggtatgcttctgctgaaggtgtccatgcggccccaaacccccgccctcacgctaccaccattcatccccttgccatctcgcgaagtcggaactaatacttatcagccatcccattgcctcctacaccacctctgccgaatcgctgtcaggtccaacaccaccctcttctcatccaggaccgggactcagcgtgtctccttaatacatatccaaatccacaatggaaggccagaacgagaacgatgagctctaccccatcgccgtgctcattgacgagttgaaggtagatctccctccagtcatacagacagtattgagctcacatttctttagcatgacgatgtgcttctcagactcaatgccattcaccgtctatccacgatcgcgcttgcacttggacccgaccgaacccgagaggagctcatcccatttcttgatggtttgtccagtgttcaatcgcctagcagccccgtctaacagtaatagattccgtcgaggacgaggacgaagttttgactgcgctgagtgaagagctgggtaattttacagaatatgttgggggtccagaacacgcgcacgtcttgctctccccgctagagaatttggcggctatcgaggagcccttggtgcgagagaaggtaccacaccagctgaaagtttcttgaggcgcatgctaactttacaggccgttgaatctctcaacaaggtatgcgaacagctttcagagagccaagttgaagagtattttgttccgctagtcctccgtctctcaaaggcagactggttcacttcgaaggtctctgcgactggtctttactccacaccatacaagaaggctactccggcgttgcaacagagcctccgacagcatttcggggctttggtacacgatgaaaccccaatggtgcggcgacaggcagccaacaatctggccaagtttgtcaaagaaatgcaaacccaggtcattattgatgaaataattcccttgtttcaatacttggcgagcgatgatcaggacagtgttcgtctgcttacagttgacattcttattgcgatcgcggaggaaattcccaaagaacaacaacctagccacggcgtcttgttgacttcgctgcggaatctgttcgaagacaagagctggagggtccgatacatggttgccgatcgatatgaaaaggtaaatcgcctttgccgaatttcagactattgagcgacactgatgtatgcagattgccaaagctgtccacgaagaggttgtcacccgtgacatggttcctgcctttgtcaagctcctcaaagatacagaggccgaggttcgcaccgcaattgcgggccaaatccctggtatgataccctggttatatatagttgatacatgactaacacattcaggcttctgcaatttgatcgatcgcgacactctcctcaatgagatcatgaccagcgttgaagaccttgtctccgatccctctcagcacgtccgggctgccctcggtactcagatcagcggcctcgcgcctattttgggcaaggaggagtaagtatcctgcttatctgctagcaataacctatactgaccatccaggactattgcccatctactccccatgtttctccagatgcttaaggatgaattccccgacgtccgactgcacattatctcgaagctcgagcaagtcaacaaaggtaaatgctgtccaattcttttaaaatgtatgtcttctaaccctttacagtcattggtatccagcttctctcccagtctcttcttcccgccattgttcaactggccgaggataagcaatggcgtgttcgccttgccatcattgaatatattccactccttgccagtcaacttggagtcgagttctttgacgagcagctgagcgatctttgcatgggctggcttggggatactgtcttttccatccgagaggctgccactgagaacctgaagaaactgacagaggtattcggcgtggagtggtcaaaagcttctatcattcccaaggtgatggccatgggccaacaccctaactatctttaccgcatgacgacatgctttgccgtttctgtaagttcactttcttgctacatcagtcaatgctaattgtcagacccttactcccgttgtcaacctcgaaattattgagaactctctcctacctattctggaacgcctagtgacggatgaaatccccaatattcgcttcaacgtcgccaagtcctacgccgttctcatcgtcacactgcgtcgtctgccagccgataagaccttagttgaggtggagaagtccgaagagcctatcgcgccatcaccccggagcctggagttgattcagtcaagagttgtgccaagtttggagaagttgcaggaggatgacgatgtggatgtccgatactttgctacaactgctggtggcaatcaggatgagatgcaaacctctccttaaactatgcacttgttcggccaatacccaacaagacattttgtcaggttagagaataaccaagcgtccttttcttccaggcgtttttaatgtagagctttcacataacgtttaaccagggtaggtagtcaaaagcaaatgcgcaaataaagacgtgcggtgcatgtaaagccactagttactacaatacagttagtacatgcgtattagagggtaaagagagggctttaagccggccctggctagagtgcgccgggggagcacctgaaccttgtgattcatttgtcagcaaaaagcggcccctgggccggggatccagtccatggtcggactgcttgttttagttatcactggcagtatatcaaataaatttgggagaccaatatcaacatctaaaatatgcttttctaaaccgcagtgcgtctcatcggcatgtcgattagcttgtgatcctatcgagactctcatttatatgactcttcagtcgccatgtcgtggccataccatttcatttctctctcggaaaacgacaagctgcatcgcagggagctgcttgatcttcgcggctattacgcacaatggtcaatcattgttgtcatcgtcgcggttcgaatttttcgctttgctacgagatcaactgctaagtgggatggcccagtttctggaaaaacccgacagtatcttgtctgcgggctgtggctactatggcttctaggcctttccatatggaacagtggtgatggtaagtcttcatcttctggtaagtttgagcaacgagctaacatggaagattacctccatttgaccaaagcattggggcgagttggcctgtcccaactgccactgcaggttctaatgtctccggcatacatctctcggccggcagcctcatctgtactgtctcttcttactggtatccctcagccaacgttgactccgtaccaccgtctctttggtcgggcggtggtctctcttctgctggctcacgccgcgctgtacacgctgttcttcgtgcaatccagccatcctgactttggtatattgctcctcaaacgaatccaagacttagacgtccaatgtggcctagccgcgatattctcggccgtgctactcattctcttcgtgcggcctgcttcccagaagggactccagtcttggcttgtgcagggaagcttccaagaacgcagaaagatgttttactttggtcatgtgtctttggtggtattattgtgtgttgcggcttatattcatgtcaagcaggcgcagaagtacattctgcagactttggcagcttctatgcttaattgggtgtgctcttgggcgctatgttagtgtaggctgggaaaatataacatcctttcaaaaagaaaattcccttggtcaagatctcaatatttactctatggatgtaatatatgagcttgtgtagcatgaatctcattcctgagtgaggtccataggagtttttaatactttttttttttgtacttggttagatcttgtttttctgagacaacttcgatctacatgtatggaatttaaccccttttttctcccccttagtagtagaaacaacaaagagtgagtaggaagttcaacggtatgttgtataactatatagtacatgaactgtgtaccctgatatatattcgatagtggtcaggtttgctactaaatatgtttctaccaatgaattcctgaacgacattcttagttttctgtcgcacgatatacatcgatgtactccgtacggtcgaggaagtcaaagcacatttggtgacacgtatatgaatagattatggcgtacctcccctgcatccgggcaacgccacatactaatagattggccccttggagaattggggccacacaaattaaaacatcatattaaaacatcactgatcgcctttgtcttttagaacgcttgaacagcacatagatagctaattagattgtgacgattacgttagaaaggcttggcggataaggttcactaatagcccgaggccaactctagacttatggagaaccctcctgacgaccttagcctcgctctctttcttcatgcctccccccaatggcagcatgcgcattcaacggttgattgtattacttgcgatcggcgttcttgcctgtctttctctcctactactacgatcatcgaagcactccgagccgcagcccatagatttgcctcctcccgaaccaatacaacaccctcagctccatgcggggcagaacacatacctccccgaaaaggaacacccgatcacgcgtctggttggaaatgcccaacaagatttcaatcatgcgcagtcccggcaatccaaaaccctggccgaggccgtgactgaatacaagcgtcgctataatatgcacccgccgccatttttcgacaagtggttcgagtttgcccagtcgagaaatgtacagctcatcgatgatttcgataccatctaccacaccctcctccccttctggggtgtgaaacctagaacgattcgcgaacgggcgcgcgagacactcggatttgacaatgcgatgatcggtgttctaattcgcgacggcaaggtgtccttaacggatggagggggcgacgccggtaagtggcagcgagacgccacggccggtatgatgaagtctttcgtgaaatacttgcccgacatggacctggtgttcaacactcacgatgagccgcgcgtaatcctccccagcgaagacctccagcgattggtgcagacagccaaggatttcactatcccagcagcgttcaagaacactccgaccaatgcgtggtccccacgtgcttcggacctaaacaaaggcgatcgcatcgacgaggtgcgcaccactcgtttcaaccgtttcgcacaccaaccgacctggacaaattcccgagtatcttgtccggttaacagcccagcgcgctcgctcgaagaaaatcccactgatgacgttgatccctatgcctatggcgaactcggcttcatctacaacaccacggcggcctctgacatctgcaataccccctccctccgccatacatacggattctttgaccgacccaacgcctttgatgtcgtccacgatctgttccccgtcttttcacagagcaagatctctagcttccaggacattatttacccaagtccttggtactgggccgacaaggttccctacgatactgaaaaggactatgcttgggaggctaagaccgaccgaatgtactggcgtggctctacaaccggtgggttttcgcgtgcgggtggctggcgccgacaacatcggcagcaatttgtcgacaacgtcaacgccttaggcaccactcaaattctcgctcgccagggggacagctgggtttcccaggttatcaaccgagacgcctatcgtgattccttcgatgtcaagttcacatttatcggccagtgcgacccggacgactgcaacgcgcagactgcgtactttggagtgttcaagcaggctgggcaacaagatgcgtgggcgcacaagttcctagtcgacatcgatgggaacgcttttagcgggcggttccacgctttcttgcatagcaacagctttgtctacaagatcgccatcttccgcgaatggcatgacgagtggttgaagccctgggtacattacgtccctctcagcttgaaaggcaacgagtatgtcgagagcatgcgatacttcacttcagaagaagagggcaaaaaggccgcccttcaaatcgctaatcagggtcagcgctgggcacagcagaccctacgaaatgaagacctggaggtttggttcttccggttactcctagagtaaggacctcgtcattccatgagagaattctgctaacttgctcacttttcaggtatggtcgcttggtagacgacaaccgtgaacaactagggttcgttctttgatctgtatatattcccttcgacgagatgatggctttttgtttttttttttggactcctgttaataccccctttcccttggactgtcttctaccaataatatttgtgcatgtggaggtggcgttcggtctgccatagattgagaaaagctgtaaactgcctacaatttacagtgtaatgtgattgcaatcctagatttcatcctgatatcatctaaattatctagattatggataccccgtacctacatatttagatgtaggtacccgctgtcaaccgttttatatcgctgactcaggcgtgacgctacctgtggaccgagctccggttgccacagctctagatttattacaagcttcttcttgctccttcaacacatgattccaatatgggcaggaccatatcccgcgttttgatcggggcagctgtctttgcctatggcttttttacagttattctttacgacctcgttgccttagcaaaaggcacctactttagacgccccactgaaaccgagaaacgagacctacagcttggtgagctatatatgtaccaatcgtgaaggttctttgctgactctccagctcgtgctcgcctgtgggatttatctaaagatttcgaaggtctctctcaccatattctaaccttgcaaagcggattcaagttccattttgttagtaacgatactccaaacacaccgaaaaccgtcaattccgataaaccgttggtcatcttcatccacggattccccgatagctgggcgatctggcgacacattatcaaaaaccctgctctgcaagaggccgtttcactagttgcgattgacctcccgggatacggaggaacagagagcctggaagaatataatgcaacaaatgtcttggagaaattgacagagctgatcgtcactctgcgaacccagtatggcgtggactcgggcaacgagagcaacaagaagaggacgataattgtcgcccatgattggggttgtgtcttgtccatgcgtctcgctgccgaagctccgtccctagcccatcggttcatcctgtccaatggaccatcagtatgtcaaaacaccggggaagatgttatctcaactaacgtttcagatcaaattggttgaatctaatatccgccgtctactcttctcgactaataagatgctcggcaacgcctggcgttcaccaatgcatgcccgcgtcccgctgatgcaagcactccgaagcttcacccctctcgcccgccagcttgtcctatccggctatatctttgccatgcagctaccaacgccaattgtctactacctcctgtccggaggcaaccagtcactattgaaaatttgccacctcacctcctacaacaaggacgaatatacttccctcgacgtggccaacagtatggccagcaccatgggtccgtccaccgcagaatcggatactaaaacttccagcggtgatgcctatcctgccaacctcagccagcgcgcgttcgcacatgtcatgcacatggcggcttattaccgtgatcgggcggcgacggcgtcttggaccaagtctattgaaacggtcgctagcttacacagtatttcatccggaaagcgactgtccagcagcggagctggactgtttgacgaaggtcccccgggcgctctcaaagctagcgcaaccattttctggggcaaggatgatattgctcttgaccagaggatctgccttgatgggatgggtgattacttagcgcagggatcccatattgtgctgcttccccgcacgggacattggacgccggttgagcgtgagagcggcgcagctttggtcaagactattgaatgggctgctcaaggtgaagagacagacatcgggacggccatcgctgaatcctacccgggtgttcaggtcaccttttcgcgataaacataggcaatatgtcggacgactccaatattcaacgttttcgttttgcggggcaacccgaactaaagcggctaggcgatgtttcacttagaccagaccgaccacttatagaagatggattccatatatgctttgtatagaagtgtagaatagcatagagaatatcggatattgagtccacgaactgtagagaagaccgaaaacatacggagtacccaaaagagaagtccagcgggatcgctgatttacccgaaaccactccacttcccctcgggagctttgaccttagctctcctgcatcccggcctttgctttcccattgcctttgcttctctcaattccacaaaagatttcttctttacacaacatgctgtgaaaaaaaaaaattcaatctcctgttttcgtcgcccctcgaacctgcggcccaggtaccacagtcggtgtattgggctcctaccggcccgaactttccttggcgattgacaggttaaatatagccccgacagctcttctcagctcttctcgtcttattttggggggtttttcttctctgctccagacttctttgggcgcctgatcattctttcgctgttagactgttggatctgtggcgtgatggattccaatggaggagcagtctactgcacggtattttaccaaccccccccccctatgcgtacggcgtaaactgaccgatgagacagcttctgttgagtgacaattatcttcccggtaagttcccattcatgtgggatgtggaattattctaaatatctataggtgctatggtccttgcccattccctacgtgacaatggtacaaaagcgaaattggtggcactctttacgccagaccgactacaatcgaccaccattgatgagctaagggtacgtacagcatccccataatctcctatacttttggcttacctattagaccgtctacgacgagctggtcccggtgaactcaatggtaaacgacacgccggcgaatctctggctcatggaccgtcccgacctaattgccacattcaccaagatcgagctctggcgcctgacgcaataccagcgggtcgtataccttgattgtgatatcatagctctccgagcccctgacgagctgttatcactggaagcagactttgctgccgcgcctgacgttggttggccggattgctttaatagtggaatgatggttctccgacctaatctacaggactactatgcgctgagggcactcgcccaacgaggtatcagcttcgatggcgctgaccagggtctgctgaacatgcatttcaaggactggcataggctaagcttcacgtataactgcacgccaagtgccaattaccagtacattcctgcgtacaagcatttccagagtaccatcagtcttatccatttcattggtgcccggaagccgtggaatatgccgagacagattgtcccgctggagtctccgtacaatcagcttctaggccagtggtgggctatctatgacagacactatcgtctgccatttgtaagtggcatgaaagactatgaagatatggactgacatttttaggtaccgaccacgtcagctgagattgaaaaaacggcgttggctcaaggtcctgttggagatcccacgagcttccacggcaaatcagtcgagcacgaacactctgctgccgttcctgttttgagtatggtaccgcagtatgttcgcggagaggagcatgtctcaacatttatcccaccatttcctcccgcgccaatcacttttgcgcctcgactgagccacgaaacatacgagccagagatacaaacaccgacacaggcacagctccactatcccagtggccatattcaccaaccacagccgctggtgccgattcgtccaattagcgagtatcaatcgcccccatctccggccccagatgcctcgacctttgaggcgccaacgtgggatccttcacggtgagagcttatccctcggcgtcgtctacaatgctaatatcccatagagagccgccaccggtcaacacgagacccgaaggtattagcttacaacagaaaacctacaatatgtctgaagacacgcatctattccaacccccgtcatcctaccccgaggcgccgaaaaacatgtggtatgaggttccagccaaaccagagcctaaacctactacggtcttcccctgggagcaccatgctccgaaacccacccgcgtcttcgccgaggcacttgtagagttagtggaaactcccacggtaccatcagaacaaaagcagcattcacctccaagcgagtctactcctcccggaccctcatcttcttacacccgggtaccatatgaacccagtgccgaatcatggcaaacatacactcgctccaacgcctgggatgaggacccagagattcagcgctatattgagacgatccaaggacggcgcacaaaatcacaagtgaccagcccgggagctcaatccaacagccccggaaaatcacctcccacgccaggcttccaccccaataccaaaattaccgactttccaacagaagtcgagcgccccagtctgcctgtaacgccggccccgatccaccgcaccagctacgggaatgaagcctccggtacagccgctctccctaccgccgagggcgtgtgtagccaggaggaatgggtgggtattacggctgatgtgttctcttctctcctcagtgcaacgtacttattatggcggtttatagaatcccctggctcagctcgaggagctgcatcgtcagcactcggaggttttggagcatcccgagcggctgtctagtcggcttgccgctgcagcatatcgtgagcgttgacagtacttattccttttcttttcttttcttgtctttctgaattttgggataatctgactttatttgttttatgattgactgattaggagatgtactcgatcttgtttgattgttgttgcatatgcatgtgtatggagatttcatgggtgatattttgttatgaaataataactgaagggagcattgaattcttcctacgcttacatttcaattggagatccatttcctaggagatatgaaggaagtctcaaggctttaaattagttatttctaccaaagagtgtgtcgttggcttgatatacgctccagttcgaaattcctgtcacttctgaaccaaagtaatattgaacgattcgatccgattcgaatgtggacatgaaatcgatatcccctcacactatacgcaaagtaggcaccaggtaatcgaggaactcgcacggaactagacaacagatatcgaggctttgattccggtgtatgatacctgatattcaatggcaagaaaagcctctcctggtcaatgtagaccacacctcgaacacctttcaatgcgatgaccaacgtattggccagtacaaattataggattgcgaataatggctttgaaggtcatgtaattttgattgcgtgaggtagagtatcaggttaggttaggacagaaaaaaacatttactcctgagcgaaagtctccgcaccaccctctgcctctgcggcctgctgctcggcaagacgctgctgctcggcggcctgctgagcggcgatagccttggcaccgtaatcctggctcataggctggagaacgggctgctcctccttgggctcgatgatagtgaccgagtcggggagagtcttctggggaccggccttgccctcggggtcggagccgcgcatgatcttaaccttgataccgaggacaccctggcggagaagaacgtgacgagtggcggagtcgatgaactccttggcgggctgaccggagtggatcatgaaaccgtcctgttacttgttagccataatattcttcaaaagctcgttttgcgattgattcgtccggcgcaattcctctggtatagacgtacagtgaacttcatggacttggcgcgggcggcacggagctttccggacacaacaacctcgcaacccttggcaccggactccataatgaaacggaggacaccgtagcaggcacgacgaacggcaagaccgttaaggagcttgtagcggagggactcgcactgagcgacagcggagagaccgcggttctggaccttggcggcgtagagggagacggagttctcggggaacttgaagcgcttctggatgagggaggtgagctcgcggatgcggcgaccctgctcaccgagaacctcctgggtgtgggtggcacggacaactggaaagcccgttagcatcagatccccaatcgaattccgcagatcccaacgcgatcgtaaatcgtcctcttcctcctctttccaggcaatttcaccagcgattttcaagcgatcacacgagggattggtttttcggatttgacgtactgatgtcggtgacagtgggagtcacacggacttccacaccggagtagccctcctcggccagctcgcgctggaagaactcgttcagctcggcatagaagacaccgtcggcgacgaactttctgcgcttagaaatagctccctgaacagcggccattttgacgttcctggtggtggtggaatcgggggttgtcgacggaggggatcgtggtcgagagacttcaattctgagagtgcattatttagtggggatttttcgggactagggctgcttgcccgtttgggccagggctcaaccctcgcttgccggcgcttttcctgtttggtcctagtgttgttaccttatccctgaggcaatattcgtaaggcaataaggcattacctagtctacggattacgagttaacattacatcgaactatacggagtactccgtcattggacgaatcattcatggttgtttaaacgcagatgcataacatacagttgtaaattcttgcaaatcatatctgattcctttgattatcccgttcattgcatctctacttctaactcggtcggtttatcggtgcgctccgctggaaatgcaagcttagatacacccgacgtcacagcagctgccatccccgagacatcagtcgttttgacagcactatctggccttgcagtctcaataccagtcaacaccgtattttccgggatatcactgggtgccgatgaggaacgggggccgttcatctccgcatctgttcgaccgaatacctcattccaccaccgtgtttcattgacccggggaaatataagtcgttccttgccgcgctgattgtcatcaatgacagggtcatacagatggttcgtgaattgttccctgcgagcgaggaaataatcccaaacgctacgggttcgttcactggctttccaatccacgcgttccttctcgttgttgaacaaaaatgtgccatattgacaggagtagagatgataaagaagtcgtcgcaggaaacgctcattaaactcaaaccgtgtcggatattgatgaagcagctgatatgttgcgtctaagaactgatggaacacagggctcgtctcttttggcttagttatctccttctcgggaacccccgagcgcggtatagtaggcttcttcgcaggagtgtcagagtcataggtttgaagctctccatccaagtccggcaaagagtcacggctattgttgtcccgaccaaagaatcctttggcactaaggaatgcattttcaatggccttgcctgcacccccgccgtcaccaaatgcacgatttggatctccaccgatgcgttcattttcaatctggaaccatttctcgctgttcaaatgaccagaccggtgtcggaacatgtgtccaaatgaaagccagtctttctctaccagcaccatgaatccctccagcgtccggaagtaaggatccaaacaaatctggctcagcgcactgagctgactcgtgcgatcccagccatcagagcagtggatcaaaacatgagaatgagtgagaccaacttgccgagtgatcagcctggctccgtccaagatcccgccaatgtgcttcaaccagccgctgcgcgctagctggtcacgatttggccctaatggagtaacatctgagtccttcaaagcatcgatcactttgttcagcgagtctcgcatgacgtggatattgtcaataccaagatatgccttggtagcgaatttgtagttgtccatgttctctgatccaagtccaacagcctgcatggcaaatgcattcaccgtagggcgtgcgtccactatcagattagactgctgagcgccatatatcgagcgatgatcttcagaatcgccacttgtagcagctaacaggtcgtcctcgagttcctcggcattggtgaattcggggactatcacctggttcatctccgggctgctagaatccgtatctttctccgtggccgagaaactcgccaatggccgctcagagcgagaagtcaagaaaatagcggacagaagcttttcgtcttgaatgcttcggttctggcggacaccgacgagcggctgtgagcttctggtaatggtgcaattattgacagggtgaaagtatgtgagggcagggattcttgctcgagatcgatagcgtcctgcgtaattaagtgtattgtcggagatggaacaaggtacgggtatgagagcgggatacgtaggggagaacttaaatgtgttagtagagcacatttggactaatttgtgcgagcatacctcgtagttcatgttgatctctgaaagacgccatgctttcccttcgtccaagcagccctggcgtgcccattccttgcgcgggtcatacagctcccacccattaaactccttttctggcgggggaggctgatagctaaaggcgtaaagcttatcaatacgactcgatttgcacgtccactgtttgatgctctcgaatacatctcgtgctttgtgctcatttacaaagtaaaaacaaacgaatgtgaagtctcggcatcggaggcggatagaagagagctgacgggaagcggcgggagctggccgcagggtgcagaaagcgatgatagggtatgtgatccacagctctctgggccttgttatgacgccctttatctggtcttctggtgagattggtggggtgtgcgaaaatatgaggtggtgaggggttagatggagggtgccatcgacctgctctccgcggcgagccaaggtcacattgtcaacctggagtgacatggtcagtgattggtctgtggtggcactcaagatatgtttttcgaaccttagcaatccgtgttttctccatgccgtataaatcactggcgcatggtcttcatgatgaatatgctgggtgaggggaacagtaggacaggagaagcggagaatcggagggcagcagtgatcacgagtgagatggaccaatataggtatatataatttaatgtgggtctgtaatcaattggggcgactactcagtctcaagcacctgcctgggccgccttggagttatcgtgaggcgcgcagagtacatgtagttgggatgagtggtgttacacgtcacgggccttgatcggctgtggggcctcaccaaggtcacgcctacaacctatattatgttctatgcatttttgcgatacccggtcagaatagattaatttcaaatgagaaatctcggcctatatagattaaaagccaaagcataatccgtgtctagagcatatatattttacataatgtacagtaaatacaaacccaagacgccgccatgatggccgttgatgcacgctgtacaaattcaaaatagaagtgacccatgctattaatccacgtatcttttgccgtggattttgaatgccatgtcacatgccgcgttgtagaacgaatggaactcatgatcaagctgctcggagtggttattccctgcggccaagtcaatttgaggaatctgcatacccagagagacctcgtttgtccgagcagcaaggaacgaaccgctttcgtagtaccggtagtcaagcggccgtccatcaaagttgtacttttggataacggcgcctcgaatgtcgctgagtggagggaacatgtattccacagcgatgctgctctctgccattgattcgtctgacttcttggatttggttttttgcgaggcaggctgatgaacaagatcacagggaaggatgatgttgcaaaatataggaatgtgaacaggaccttgcgaagccccgctgttgacaattgagccctggagtgaggttttaatgctttgcagcattacttggatcgggagcgaaaaggaagtctcggggaagaggtgctcagaggagctttgcgggttttctgagttgggagatgacttatacaagaggtcttgggagatagttcgtgtgaaacgcaggtccagaccattttccggaagcaagtagtcaacgctgtttgtggcgaggatagcctttacgctgtggacgtccacgccattcaagtttgaattcacggctatctcaatttcgagttccggtggggatgctgtgtttgaggttggagacaatcgaagtcgatatagctgtgcctcgttcttcgggcgaataggcgtgagtgtgttgatgaaacgcgacaccagaggtacgtcgtttgtgaaagcccgtggaagggagagtctccctagctgtgccggactgatggctgtatcatcgaaagagggcttttgcataaaaaggcatttcccaaccacggctgtcacggattcatgcaaaccggcgacaaaaccgttcttcggaggagtaaaacggagaagcttcaatagttcatctgagagtcgtgtttgatgcttgtcgaagaaaggggtttcgagggattccgcctccgcgttttgactggaagacattgcccagcggaaccaagacttttgctgctcgaaccacgaagcatgagtttctggtttgtagctataggcactggcaagttctgaagcaggtaaatatgttgaaaatggcgtcgatggagatgtagtgttggataaggccaagttcaaggtcctccgcgcattatccgctcccaacttattctcgttaagatagagaatcttttgtggtggtctgtgtgctcggtgttccacaaatacaccgtgtgtgctgttgacccattccaaaaagtctggtgtaaaaacttgacttattccatctccatgaatatatgggttgattccaacatcatcctcgcggattctgccagtggcatcaatgataatctcgtgcacagactcacaatcatctcgcttgccagtaagtgataccaggcccgcagattgtgtgacatcaataccacagccatggagactagctagctcatggaaagagaaatgctcagcatggagaagcaaggatatgaattgagctggtatgcggaattccagctggccacgctcgccatcagccaccagctgccaacaattccgaacgatcgtctctgcagcccgggattttcccctgaagcccttggtctttcccaataacgatttggagttacttgacccccatgtccagcctttctcttctatcacagaattgcggttgtactctgaaataaactccgacaattgcttgtatgtgaaagaggaagctaattttgaccacaatgccttgagatcggcagcaggcaagatctgtcctacttgatatgatccacgaatctcatcaattctttcatggactgacttatcgctgggcgatgagttttcctcgttaagttcatccaacatggtgctgattgtgccggcatattcattcccgggctttttgttgcgattgcgattcaacattcggcggcgacgggaaggcacaacaactatttgccctggctttccaagcgtatccacatccaatgtaaacgtgcctgtttcacgttttccattatctttcggttcgcggtttcgttcggatttggggccatcgaaagcgtcgcgttcatcatcgcgactccagttactctggtatcggggaagaacagcgtgtgggtatgacaataatggtctccgatatgaaagcgactggaagctcagaagccccagcttgttccctgtggggcgtcgaagcatgacagaacaataggtctattgcaaacctggtgaaggcaaatatctgtgatcacttttctccggcgataatcggggcgctaggccgcgataagaaaataattcctgcctcaggcagaattccctatctactatgtgtacgattttcaacaagaactttgattatgtaggacaacgctctctcagatatctctcctaattccgtgcgaaatggtttatctaaagtagatgattcaaaccatatgctaataagtaacgcagaaaggtatgtagaattcattcctttggtacaacttcccagctgcgcaagtcctctcttacatcgaactcggaaagctcattatttgtatctggcaccttccatgcccgacccatgaccccctcatacaactgctgctcgatgcttccacccttcttctgatgcccaagcgcagcgagagactctggggtcttactgctcctatgtgagcgattgctggaagaactcttagggcgccgctcgaaacttggagacaattttttgccagaccggctttgtcgtggggccgtctctgttgtcaataggatatcacggcgatcgcccgctgagattccagcgtgggaattgtgtgcatcgttgttccagcaggaacttccagcaaacaactcttcaaccaactgatcagcaggcaaatcaccagctctggaagaccacgacgctgctaaggtgcgccgatacatgtcttgcatatctgcagtctcccggctcttgctgtcaatagacggcagctggccaaattcatcggcgttgacgggctgatcggtggattgaacaactccggcgattcctccaaagacagtggcagatttcagatgtggtcttttgtaatcagcattgagagtgtgggtcagaaataagtttagggcttcacttacgtcgtgaagttgcggtctccttctagctgacgcatcgcgatcccaatcttgacagtactgttcactttactttcatgcatcaggtatcgccgaatgatcccttcgtcttcctcggttttttccacgtattcagcaagattgagtttgattttgcccagcacgctcttttcggacatgggcgacgaggtgaactcttgtatgacttcaaaattgagttcacactcctgaagaattgatgtcctgtcaattgtaagccttacttgaaggcatttctcataaccccagtaagcgcggtgatctaatagagttgctttctctgtgtagccttggtgttcagtggagcttgacgatggcaatcgccatcgcacaaaagcaacgctgtttcccaaggggacgttattgatatcgatgatctttttgaggtcagaaatcttaataacatttcgacggtctgtgtataatgcatacccttaatatgagctcgaacctaggctgtagcagagtcagttacagatgtaattcagtcggctttattggttaacttactcgtctattcttggggactatggtgagtgtgttagcttacatcaattaacaggtatagaggaacataccaaatgcctgcatgttaacggtcacgtcaccggctcaagcttgtgggaactcagatgccacaagcacatcaactggtccactcaggaccgacctcgaggaaatatctcggtctgaggctgagaagaaactcaactagcatgaatatcaaatgccaagcagtgatagcgtcgtcaaattggctaagagtcctccccgcatacaccgtggacattatgggcggtgaagtgtcataacatggcagaatcaataaccagactcgccagtatccatctcacctcttctcccaaagtctcaggcgatcaatacctgttgcttgcgaaatagtaccatttctttcaaccttatatcgctccacgaccatggtgaaacccgagcctactcctcccgcttcatctctccctgccgaagccgcaacagtccctttggattcaacaacccgcgttaccccaatccaccccgatctcaccgaaataaaagttccaaaaggggcactgccatcatattgctatgacccagtaacatgccaaccaatcaaacatcgggattaccaaaatgagcttatgcaactggaagaacaatacaaaacacgtgaggcagcgctccatgcgcaggaagaaattgccaaagaggtgaaagagaagattgagactgcggaacggaaacgagaggaggttcaaaaatccattgacaaaaaggtcaaggaacgcgacaccgagatgaaggtcgtgtccaagtttcaagagaccaaggcatcggacattccgtcttgagggaggtgacagcagcgctttttctaaaccattcagacgacaaaggagtaaccaaggttttcttcacgctattgtcaccttttctggcggacagcctacgcttcacaaaagaaatttaattcgctttcagctcgaaagaactcttcatctataattcctgtgaaggcaactaccccgacactcactatggatcatatcattgtcaacaattctttagaaagaacatctctgtttggtttaaatgtggggaggcaggcaagctaaggaacatttgcgcctatgtctatccgtgtgagagttcgcttgaacactatgccaatgggctctccaatctaattccaacatcttgaagcgaacgtcactcgactctttggggaatttcagcacaatgataaacgcctctcgcgcacaataccaactcatggaaatcgaagagctattatcacatgtcaaataattctcccatctaaatagcaacccatccagatcaaatcgtcggaaattcaaacagcatcaataaaacaccccgacatgctttgagatgttctgtttagacgtatagaaggctgtgaaagcatagaccatgcagaggactttcctatgtacaactagagatgtcagtgggaatggggtgattggacccgatgccggcggagaactacgctttttcgttccgttttcacggtttcgagcgggctgtctatgacctcccaagccgccggcgaggttggggttcatatgtcgtcaatcgatccgtccactgtctgaagctagttgcttggacttacggagccacgaatagcgatgctggattttacgacttgcagatttagcatctcgcttggtttgcgtggtttgcactatgattgctttcttgcttgatggtattaatctcgtttgacttaatgtcctgagcagatatcgcacttgaccgctggtttcgtctaacgagacgatgcattaaatcaagccaggaaggacagtgtcgggccctatgataagcgtatctcagtgagaaaatgaaccacacccttcgatcaatagtgtttcaagttcactatcctcactatgtttcgttcaaccttgctgagggtttccggtctacgtgattcgttccttaacaatggcatatttgaccttggtatatgctcccccatgaggcgggtgagtatatagagctgcggagagaacaacaatgtatctctataactatctattgttcctcgtgtagttcctaccctcctcttaactttatcccggagagccccattgtgtgataatcttctcttcatatgttttcctcattcgctatgcttttctaatttttggaattacatcctcatacggtactcggccactctatgctcccctatgctaaaaagaaaagctccaacagtcattcgatgctagatacacggttcccgcattgctacatagtttacgtcatcgtaggaatatgtgtcaactcgcctactccgtagtagaatataacctaacaatgattgagaacaaggtgtaaggctatggccctcaacacactatacagacgtttgtgtgaaaagccgccaagagatatgccatctcatggccacagctagagggagttattaaggccgaagagatataacaggtaggagtaacgagtttcttattgagagagaccaccacatcctgtcgaataataacccctaatgacaactcagcagtattcttacgtatcgttattccaacggcttatcagaaaaccgagtccttgagttgtactatgaggaagcgacaagccataccttactggtgagacatgaacgatgaggctcaatatatgtattcgttaatgtaatgtattttgtcgaagaactgctcttcggagctatagggaccaactgaaaaagctaaatgtatagaaaggtacaatttatgctcaccgagtcaatattatgtataaaagagtagtcataacaccacaatgtttaatgctacgaaagatgtttttacgctttctcagtagcgatgtcgttaccatactctccgacctgacttattggtaaggtgctttgtttccaaggctgccaattagcataaaaaatgttcggagattttcaacacagccaaacgcattactcggaggtttgagtactacccaacaataggggatgtctaggaagaagaaaggaaattctatcagggctgttgcaaaatgaacaatgatttgtgagtcacgggtttcatgatcaagtgtaccactcattcatgaataagccccttgggtatattccaaaagcataagtcatagtaaagcagttgcttagcatagctaaaagcaatgatttattccggattcacctaggagtttgtccaacgaacggtatcgcgtccaatagtagagcattgtctagcttcgtttcaaatcgaacatcatcagacacatatgagtcataacagatgcggtctgcaaaatataatggatctcagatataactccgtttatagtgcagtgatgtcaatattccaacttgatggcagccttgacaattacgaaactaggcttgatagagctgggtttcagtacccgcctggctgtggatgtggttaagatctacctgagattccagctctcaactcttgccaactcatacctcttctccagtggggtttcagcaagacaagtgaagtggacagagggaggcaagaaaatatacggagtagtaagttactactgtactactccgtagtaactagggctttgcattgtatgtccatgtggggccggagatatccgccacaacgtggcgagtaaattgcaccgcctcatatctattttaggaaaagcgacctcggtcgcatatcgttaggccatgctactctatagatacacaataacaatgacgaaagctcatccgactcaaagcgaaccctcatacacccacacaagaccatgtgaccgaactcatatgcagcagggattccattttagggaagaggcagaggcgcctgcggagtacagagtaagatgagatcattgaagacatgaatcatgtggagaaaacaataggaaacggtatttcagtacgtgaaggctagtggcgccgacccaaagtctggcaatggaggctcagcccaatggcagatcgtagcagggatctcagcttcctgtgcattggccggactcggttggtctcagcgaatcccagccctgaagtgactcaagacgggctctgccccacgcttggtcgaccctccatcagctgaggtctacgactctgtatcgtcctagcggcactcgataggtccaaaaaaaccttgatatggttgatatggttgttatggatgtgtttcgtgtaatttgttaatacagtaaaccttggagtattattttctcttctccaaggctaatatccagttggatattgaagcacaaacgatgttgaaacagaaaatgggatcgaaactaaggcttggcctgcagccaaatttaaattagagtcttcacccaagcgtggaatctttagtgttgaggatcctgtatcttttttaacgatgtgtagatcttggcgcacactgaaatatgcacatcgcccagctgagaaatgtatattttaagtccccgctagttgtagatagtaatttgatcgctctagatgatctatggagactcaaatcttcctgtttctttccgttcacggccgtttccatggatcattggggcttagctgttgcagtttagggcaccatgcagctattctgaccaaatggacgtgcaacgggtgagactggcactgtgcgagtcaacctgtcaaatttgatgaaacgtttagatgtcgcgcatttcgaaccgtttcaagtggtattatcgccactgagtcttcaggttgcagatcggggagtccgagatgtgtatgtacgtactccgtacactgacattgactccatcaagctgcataccagaataataccgtagaaaacttggtttatatgttttttttttcctaatatgtcctaagagccaaaaaaatagaaaaattaacatattattgtggccattaaatctccgcttatggtccccctcttaattattattcttcttaacttccctcttttcttctataacctcactcttgactgactttcatgtcatctcctttcttttatattataatttctgttctttttgcgcattcgcccgcactttaatactggattactcgacatatcaacccaatctcaaaaaaaatccaaaacttcttgtgtgggcgaatgtcgcctttatgattcatgttctatattctacattcatttatatcaactataccaacgccggacgtatcacctttcgcacagtgtcataatgcaaacaatcttactcccatcttctgccgctgcttttgcgccgcgatcatccccgaatgtcgtgttgaataccaaggttgagccttggttgacggccaccctgaagcgagttaaccgggtcaagcgtcctttgaacaatgtcacccagcatacccggtgtttgacggaaacactttcgtcaaaaaatgcaatctggactctatgttccatgatgttcaccaaggccccccaggcagagctagagaagaacgagaaccagctttgggaatccctgcacagccaccaaatgattcacatggaggcctatgttgtacatgtcgacatggtctcccgcaacgaggtggttttcaagttgactccggaaaccatcgaatccctggttgattttcacaaggatgtctactcggtggacgccgccgccaacacatacgactggccaggaaagcacggtgagctgaagaggttacaggaggagtttgtccaagcagccaacaagtttgtctaccgtgccaatgcccaggcacttgaggggctagaagaagacggcgccggagagctactaagcggtcgcagcgacgaagcaaaggcagccatcggcaagctctttatcccactggttgccccttcacctccagtggtggatgtcatgcgcccaattcctctcctgcctagttcgacaggcccggaaaactggtggcaaaacccggtgccccaacaagcaccactcgagtcgtggaaagtactgtcgcccagccccaacccggccaccacgggtgattctaatccgaatctttgggctagtctcagtttcagtgatgcccaacttgcctcaccgaccccgtcttacagccaacccttcactccttcgccgttccagacctacaactgcctaccaaccacctgtatgccaactacctgcatgccgaccacgtcagccgccatcagtccgctcccgttgccgaccatgttcccaagcatattcccgagcatgcttgtacaaccctgcagcacagctttcaacatggggggctttagctgggccgactttgctccgctaccgtatggcacgatcgtctagctcagccctcctgagtagactcagtgatgtcgaccatctcaagtccaggctccctcggttcatacaacgtgggttcgagaaacgtggatcgtttcttagaactagatgtgcgcgcaattctttcggtttcttcttgactccccaactcctctctctcgtctctccctaccgggaacccgattccaagcaacgacaattcgcatccttgacggcgttctctttgatttgacactgtgcatctgtgatactccctcctgccttttgcatgataaccagaattatctttttctgcgcttgttttgatagttttgatgtttgattctagcgccagcgtgtctttttttactctttctctttttcatttttctttgcattaagaagcggcgggtcggctctctgttatgtttcgtttcttttgttgttcccgcatatatgtcatgaagactggtctgcctcacggcatgtggaggatatgaatttggacgtggaatgtccaacgttatgttttcgattcttctaccgcaactcctggaaatggaagaaagcaagtatgggttacccgactggactgggttcagcgtctgcctttggtttcctcctttcttacgaggtctgtccttctggtactggttactggactggctagttctctttatctgagaattagaggatatgtttatgcgatggcgtcaccttcatccatgtatctgtgatacttgattggagcacgcatttttgtcatctttggttcaaggaggtgcagatcagcaacacgagtgtgggagaagattgccttcaacccttgtcagactcgagtacatccgcctgtggcagattccgagcgcaaagggcgatgcactggatttcctcctttggtctgtgacctggggatcttcacattccgccccaagcggcaagtggtatgagtggcagtcatctccgtcctctgtgctacgaactcacctctaatggccatagttggctgatagattcatcttctatcgtccaggctggtttttagatattcctggacaagcttggtctgtcggtgggctctttcactggatgtaagagcccttcattctttatcccgacgacaagaatcagatgctcgatctgatagatactctcctttatgatctgtttggtcgaggggctggtccctcgcgctggttgctccttttctcctggtcttttttgttgatccatcagcagctctgtccaaatcttccatgtatctctttagcttagttttgaaaagagcttgcacaatttcttcctctcaatttgtacctattcgtcggaagtaaagtatcaaacacagtgtccggcatttccttatagaataagactcatcataacaaaaatctgaatataaatacatgtctcaagatccagatgatgttggttgtgtacacagttatttaccccaggtgtatgacgtcaacgtcaaccgccaagacagcccggcctacatcatatccaagttgatcgagactcggcgtgtttcgttcacaggtcacttcttttctatacttgcatctatatctggcttcttttatctgatattggctttttgcatgtaatttcgttgcatttgtctcttatctgggatttaccagctcatgcttcagcaattgataacctagagcctttctgcacagaaccatttccgcctaagcaagccacctgaggattgttagacattgcaatcttcattagattcggatatcttggtgcccaagtgtccgccacccgcttatcccacctccgtggcctaatcccggcataaccacgagctgacaaaccccgctccttgaaacaagtggacatcccgaggtcacttgcactaccggcacaacttggataacatcacagaaggagaggacttcaaatattagggcactcctactgcacatatggctaccttacacgatgccctccaatgcctcaaaccgacgtcatgggacgaagtcccccaggatcccgacgagctccgtgactacttgcgcgcgatcttcaaaaacagccgcctgatagcggagtcacttccagaccctccaatctccgataatcacgactacccaggattagacgacacaccgaattcctccgaccgacgaatagtcccatcacccgcacgagtggaagagaccgattcggaaattacagacctgcaaaaggaatgggggaagccgctcaagatgggcggaccgaaggacaacccgttagacgtgactgtgtggaaactttccgcaaatgacggcgggggctcatggttcgggcgacggagtgtgcatgagggcatgccattttcacgatggcggaagaagctttcatctgagtacgatgaaacgctcaaagtaaaccgcagaaagattgagagggggcacacgcctgacaagagcattcgcgggatcggcgccgaaggaaagatggatactattgaggtcaaggatcatgatggttcggttctgggccatttagttgtttaccatgtatcggcgcagtttcccaaacctacttctccccgcgattttgtggaattgatcatcaattccgattctggattgcaaattggcggaactaagcagccaggtcgcagctggatgatgatctctaagccgtgtgaacaccccggtatcccgcataaacagggatacactcgcggacagtatgagtctgtcgagctcattcgggagattcctaagaagcacagcagtgggagcagctcttctagccaggggagtaagaagaatagtgattctgcgtcctccaattcgcaacgccctgtggggctacctgggcaggatggagctggggatgaggaacatgaagaaatgaatcctgttgaatggatcatggtcagcaggagtgatccgggcgggaacatcccgcggtggatggtggacaagggaacaccacgaagcgtggggacagacgccgctaaattcgtcaattgggctcttcaagatgacaagccgcccaagcgaggagaaatcacaggaatggaagctgcagatactttatcaggcgtcaaggctaaacccggggagtctgtgaatgaatacgactccgaccaggaagatgactcggattcggattacgaatcactcgacagcgactccgaccagtcccatcatggtctgattgctagtgtcactggcttgctcaatactggactggaacggttcgcgccacaagttctaggctatggcgcccccactagggtatcgggtgatctaccagccgagaatgaggtttcctacattgatgcagatggaatgagacatctacgtccagaaattgcccaacaaaataaatcagcgttggacgccgaatcttcaagatcccaagagcaagacgatgtttcattatcctcggccaattccgaaaaagcagcaactgccgtcgaggacgtaacgaataacatgtccccggaggaactgatccaaatgacaaagaatggcaagctcagttccaacgagaaggagctcgcaaagctagccattcgcaaacgcaaggttgaaagcaagctagaggaagtccgcgccgaaatcgacaaattccaaatctcatcgcaaccgcctagtgtctcagggaccccagtaaaaggcatcagcgaggcagatggtgacactaccggaatgcgcaagcgcgcagcaacgaataggtcttccaggcctgccagcactcgcacacagcagagccaaggccaaccgcagagcgagatcagcaatgaagaccaaccatctcctgggcggatggcaacccccgacccgtcgcatctccccaaagcagccacccactatgtccacggagaatctaagctgcttaagcagctgcgcaagatcgaggctaaccaactgaaggttgcgtcgaagattcaagcaaggcagcaaaaggatgaggagcgctcggagaagtctaagtccaaaaacaagtccgaggttgataccttgaagcaggaggtacataatctcaagaaagaggtcaagcagcttcgctctgagcgccagaaatgggtcgatcttgtttcttcgttgcaggcggagaatacgaagttggcggcaaagtcggaggttgcttaattggtggatgaccataattctatggcttgtacatactacattgttttcttttttcttgttttgattttgacgggagggtctgacatgtcctatgattttataacgacatactttgtcctatgtcttttactgcatatttctacggaatgaaagttggaattggatatcttcatgtctcaatacattatcgtcatgatgatttgattatgatattgcagaccatgatagatcaagtgaagatacggctctggggctgttttccctatgcattgggtgcagttgagtaatctgatgctcttcaagcaattccaggccatctacaggccatggtgctagttgggtagttcagaacttgctgataacttcatgtggtaggcagggtatatcacaagttgtccgctcactgacaagaattgaaagattctcgaggttccagaatacgggcaaacactcggggataccaactgccagaaatagggatacgacggccttgttcgtttagagcgtttcatatgttgagttggaattgttattcctaccgaaggaatcgaggggtggtcggaatatcgggggatctgtatggaaatccgaggacgcgacaaggggtatcaaggaaaacaagaataagccacacttagtaggtttactcttgagtctaatcattggagagcacttgttagccaacccatccttgtatatgctgagcaactccgcaagatgccacatacctctggcggattaccagcgcctctaaccattttctccagcatcattgcgcgcaccttctcttttggttcgcccatgccgactgccatgtaggatagcagaggagggtgaccaacgtaggaggagtagctgtcacggaggatgttggatgtccattcgtacttggtggtgtcggcgtgtccggtaccgatgtaacgggcctggagagcctcaaggttctggatggtacggagcttgtcggccatggtggagaatagagatgttgacgttggactgagaaggatcgcgggaaacttgaaaggacgacaaaagatagaagggaactaattatgcctcaggcatatattatatgggtaacacgtgactgtgtgggcatcttgggattcttcaatcctgtctttgccttcaacaaagcctttggttgtttagaaaattgctactcggactgtgaccatatccaatgtctgtggacacatctagttcatcattaccgtcccggatagcatcgctggttcatgcacatttcgatgctctgccaacacgcagtaagccaaccatatttccggatggatcgagagaatggattccaatgactggtattgtagctgtcaaaggtatgctccattacttaacatgaccaggttatcatccctcatccatgcatgtaatgtgaaggggatgggtccatcatttgctttttacttcatcctcacaacacttgatgttctatagtaacgtttttgtctcttcccttataggagaaaacacacattctgaaagtctgacctgcatatctgtcacgtaagttttgaattccccacttgcaagtctgacccatattcactgatattcatgtaggagtggcgcaaaatgcttgtcagcatctcacatcccacgctgtaggggtcttgtactacatgactgtcacgccgagatattggccatccgagcattcaattattggctcttgacggaatgcaacagtgtcctatttcgggagaagcaattaccgaatggccatgatacttgtaccctcgataatgagaaaatctcagattccccatttatacaaaggagagagattgaagaggatgaagataatactagtacaccgctcacagaatggccgccttttaagcttcggcctgatatcaagatttacatgtattgcacatgtgctccctgcggcgatgcgagcatggagctctgcatggcagctcaagaagacgctacaccgtgggagatttcacagcaagaagcctctttgtcagaaatccaagacgcagagctcccagatacagagacccttctagatggccgggcccatttctctcttctcggggtcgtacgtcgaaagccagcacgaatggacgccgagtccacacgcagcaagtcctgctcagacaagcttgcattacggcaggtttcctccttgctgtcctgtgagaccagtcgcctcattgctcctacagaaaacgcctatctagcaggtctgattcttcctgaggacgaaataagccaagttggctgtgcccgttcctttggcgagaatggccgaatgcagcctttgggtgggcgatattggcctagaggggcaaatttcaaagaaagcacaccaggatatcgattccggccattccaggttctttcggtgccgagtgaagaggtgacagcactttggcgtttcgctaagcccaaatccgggcctcttcctgcagcttctgtggagcagcaaggagacccttcgagccccggtacaaatgttaggaagaccaggccagggaatgtgagcgccatttgggtattggctccctcgtatcatcacccattggtaatgaccatggataccggcagcaagtcagtgccaactctttgccgttccaagactggtttgtatgagactatcatcaacggtgtgaagcaaggaaaccgggcatcctcacctggtgcccgtggagcctcttctctatcccgagccaagctttggtctctatttcgcgaaattgggcctacatccgttccacgcacctatacaactgatgtctccccagccggaccgttattggggactgaagattctcatatcaaggcagttcaacaacacatgccagatataaccacctaccaggatttcaaaaatcctaccagattaggagacccgttgcaaatccgtatgcaggccatcagggatgcgaaagtggttctcaagggatggattcctaatgcaggagatgaatcttggggcttggatgttttggttgaccccaaaaagcgaaagcgttgattgtgtccagggatgaaagagtgctaaagattactctaggccatacatagtaaacctatcgtattcccctctcaagatacccatatatcgtttctaaacaaaaaaaagccatatgtttaaaaaacttcttgctatcagagagaaaataagaggactggtttgtaccgttcttgattggcagccaaaggcgtcaaacaaaaaaccgcgatctaatcaatcagggtgtcaatgagtccaagagaatgtcaacaatgggatgtctcagggtttttctcacacctttgattgtttgttcttgttcttctcaccactatctttcttctcccatgctttctgatcccagtctcaccaacccacgacttcacaccttagatgtcaactcccatgagcaacattcgatagaggaatccgcttcttcaagagagcactgatttcatactccagctttgtcttcaagatgactccgaaggctctagccaagtgtgcaaaatgtgagacaaaagctaagacaatgtgtttgggctgctcgcatgcacccgaataccaaagcggcgattctcgagttgttttttactgcagccacaagtgtcagataatggactggccaaaacacaaagcctattgcaagaatatgcagcgacggaaattactcttccgagctgccctgatattgaaggcagccatgttggcatacagagagactgtatacgacgtggatctaaccaagattgagtatcgagatggagtcctgtatctccatcaaaatcaaagaccggtttcatctctatctaaacgtggtcccttcccaaaccacatcactgacaacatcgaccacaaggaagcggctctcctgaaaagccaatccacagcagccatgtcactcttaggtcccttgaccagaaaactccttggaggtaagaattatttctaactcctaagtacccaagtgagacatggctgaaacaaagcaggggtacccttgaaaatcgagaccatggtcgtcaatatcgggaggccacgggttccaactaggcttgttcctggtcctgacttgtacggcggtccgcacgcggttttgaagatagaacggatggagaggaacgaaacatggattatcgatacaacaggttgtcaatatggattccgagatgtgcttgttccattcgccaagtactttattgacaacgaatgccggatattggacggccctcgggtttacgacgcatgcgagacaaaggagctagactacttgtcaacccttcatatcttcaacaagacaaaagcacaacggcaagatatgcgactagaacggctgacccgtcaccattttgctgtcttcgtttatatgagtgtgcatgataacttccttgtggactctggcgccagctacaagagaaagattgatcgcttcgtcaatgagctcaaaactcacatggttgattctatgaggaaggcaggtgacaattttgaagattctgaagatgattgaagaacaacggaacggttcatactggtacatttgttcaatgagtttcaaactcgcgtctcactttcgatatcaattatgtaaataatttcccctattccctccatccctccctcctctacttggtagttattgccatgggattgacactgaggaataattttaagttgatcggaacgagcaatctatcttattcgagtaattcccgcccggttacatagaccaattcatgcagatattcctttggtggccaactccgattgctcggttaataggaaattccgatatccctggcatgccgaacacagctcacggatcgagtcagaatatcagagatgactccggggattgggatagctagtatcttgctccttatacccttgagagcaggcttgattcggtgggcctattataaaagtaatcgcagataaaagtattggggatcattaatatacaaaaataaggcatagaagtaaatccaaaaacatgtgaaagtagttcttgataaaatctctcagtagattccagggatgatgcgactgcggacgatcgaggtataacgcttccagtcagcgccatacttcttctcgcatttctcctcatcacgcatctcacggtggatcaacaagataccaaagtagagcatgtagaagtatgtgaaaatcataccccagccacggatttctggggtctgcatggcttgcttctgggcagcgccactggctgggttgatgctctcgatgagaacatatcccgcaacaccagttggtaggcagtaggcccacgacatagtccagtcgcccaggtagttgatgtgacgcgccagaccccaccagccggagatcatcagtttagatccagcggcagtttcgatgtacttgatgtttttcacgcgggggtcattgggattcgtgcggaaacggttcttctgattgttggcgccgcggaagatcgaatatccaacggctgtgacacctagaacaacagtcataccggtcaagccaagctcgtaggggaagacagagagataacggctctggatgctgtacagatggggcacccaaaccacgtcgccaaaagataacatgaatccaaatccgtccatgattacatccatggtggtcatgattgctggctccatgtatagggcatcaagaatgtagaatccctggaaaagagtgaccagcacaattgagtcagtgatatagccataggttcggtattggtgggctacattggacaggttcagaattgtccatccaagcaagcccggtctcatctccatgaacaccttgatatcgacagtacgcgatgcctcactgacaaacggaatgggcaggcgaacacgagggttgagttcacgtccaatgaagaagtcgtagagcatgttgcccgtatggccaccgggtgccagctctcgtagatttgggtttgcctgccctggggctggaactgtgaagctcctcacgtagacgaacagtgcagcaaaagaagagatcaacaagtttgctgtaatgacctggacatagttgtcccatagaaatgtccacaccacaaagtcggctccatagagataagtgcccccggtgaggcccgagaggataatgatggcagaggagaacgctacaaatgagccgagtcagaaaaaaaaacttcaatgttttgaatgcgatgtgtgagggaggactgctgccaatgccataccattgaatttatacttcagctgtcctctgcaggccaacacaacaccatctgcctcctgaccgggaaggaagacctgcaagaacagactgaagacatagtagctcagtgtccacagtgtaacattggtatcataaagcgccgtgattccctcctccggccaacccacttcacgcttcaattgttcgagtgacaaagtcgagggattcagtagcgatggtgcgggacaaccagagacatcgttgcagacgaaggtaaagaggtagatcaggatgggcaatccaaatataataccaaaagcacctagtctattgcaaatgtcagctcagcttaacgcgattgaaagggaaaagacatacggtccaccaaactcataaccacgtttctccggcactggctgcacgggtgtttttttggagtcctttttggtaggcatattgaagtgatgactgggccaatggatagacagagaaataatccaagagctggggaagatccttaaataagacccgggagccttaaggcgcgtacgacatcggatggttggtgttccgccaggtttgctccgcatcgcccccacagcggtgatgctacgtaagcctctatctctatcagcccggcgttacctgcacgcatacaacctacctccttcgcaccgatccattaaggtcatttctatcattttgcaggttatatatctttctctagtctctccacattctttactttattccatttcatctcgttctattctcagactgccttaggcttgggtgaccagtccaccatgaggctcactagctccgctcattactccattttccttctatcctcaattctcggattatctagcgcatcatactcttcccattttgaagatgacgctccctgtgttgcccgctcgccgaccactggattgtacttcgacctcaatgcgatctcattatccccgcccaaaatgaaggacggaaacaaactctcgaaggatgcgcggaccgagagctggtatgccaggggtcatgattacccggctaatttcacaatcaacatatgcgcgccggtcattgagaacgtgacggatgtggtcgggatagagtcatcgcggtggaagaacgtcagtgcatattacgagcgggatgataaaagatactccatagggtatggcagatctctatctaaaccggttacactggttgtattccctgcttactgtgctaacgattctcggtcatatacaggcaacaagcatctgaacctttcttccgtggccgcaaactcgttctcaattataccaatggctcgccttgtccggacaattataacacgggcagttccaatgcctccacacgcaataagtcgactatcatgtctttcctatgtgaccgcgacgctgcgccaaacgtggccacggcttccttcgttggctccatggatgagtgctcatacttcttcgaagtccgtagctcggcggcatgtggtggaatcgccgtagatcccaacgccggcggcttgggaccgggcggcgtattcggtgtgatgtgagcaccccttctgcgtcttgggggaacaccccatataatccatgctgaccctgtcctctagtatggtgatcgccatcgccgtatatctgattggtggctgcgcctaccagcgaacggtcatgcatcaacgtggctggcgccagtgtccaaacttcagcctgtgggctggcgttttcgactttgtcaaagtaagtatcctagcattgatcccatgttggcctcgtcgcaaattcagacatggcaagttcgtgtcgcataagtttcgggattcaaatggggcaggactacctgtttcaaggatggattgaagtcgctctggctagtctagggaccaatcccttcgggaaagacggttgcggttggcctgtcccatccatttccttatttcttgtcaggcatagatcattcttttttttacctgcatgttctttcctttgattctgaccgcctgtgttgatcacggcgtctacatttccatatgtttgacaagatgtcttgattcatgcaagtggattgtcccttgggtacttgtcaatgaatctgccacttcatcttcgggatggtaggagacagctcctcttacttggttagacggactatatgttttattgcgtgtacttaaatgattggtttcaattgcgagcctcgttgtttgaaacatgacactgaccacttctttctttctgcaccaacaggacatgttcgtgattctcttttcgtcgctaggtaacctcttccgttgcagggggtccgccgcaggcaatggctacacccgcgcggactcggacggccgtggcggtttcatcggcgccatcggaggacgtggggggcgtgggggacgcggtcaggggcgtgacgtggatgccgagaacaggctcatagatcaactggatgaagagtgggatgattagtcgagggttgcttttactttatcttctctgctttcctatacactttccttgcctttttcgtctggcagctattgccacttttgttcctcagctctttcaaacaatagatttcgaggccttcgcccttgtctttttatctgtgatgcaaataattcccgtgttatcatattttgtaagcgtttacatacctctcgaggtcggtggaatatatattcacattcaagactctgtgtaccatatcaattcacacattgcctacagacttgttcaaatgtgagcagaattgagattaaattctaaatgaacttatccaatcacatctatcaaattcaattacgcatacctactttaactatttgatcttactttcaatgtgaattatagtcgtgagtctaagcaaacatagttactacagtgaagaacaaatcatacaactagcatcattggtctagtggtagaattcgtcgttgccatcgacgaggcccgtgttcgattcacggatgatgcacaacatttacttttttgtatctcatttgcaggattttatttggcagaggaaaaagattctaattgcttttttttttatttctttagatcactggagtcattcggaaagttgtaatgtctaaccaagaagaccgagccattagacttatattattcggaacatctgccccaaaaaagggatataaatgccgtagacaagacaataatatttacacaaatcaacacaaatggggtaatatgaatagcagcgcgaaaagtaacaaaccccagccctaaaagtccgactccaaccctttgaaatcatcgtaaagaaaagtgaaacaccacgtagcagtcgtcgagaaagcattagctgatggatagtatatgatccgatcatggccgtgagactttcatattcgaaccagtcaaaccaaggtcatatgcgcttaaaggcatgccaccagcacccctgaagccatacatatctacagaaggaagcccgggcgtgccgccactattaactaccccaggcatgggagctgggggtggagcttgtgatggttggtttccaccgctaacagggtcaagattgaaaggcaggaaccacgcgctgggctggtagaactcgcccattccagcaggggcacttgggtccagatggcccgtgaacagtgtttgatctggacttggtgtttggacgccattgagtggtgggataggagggttgtttgggacaaatgagctggggtcgaattcggaaaatgaaccatagacgaattgccggtctagctgcggtaattggtctggtgggataccgaagtcgaatggcggttggccgaacgacattggtcgggattgttggagcatggatggctgtgggaatgcgctgcctgcaacactcggggtatttccgatggttgcttccatcattgatggtgatgaagactgttccatgcctgaagctccatcggatagtttgctgttcttccgagaccgcgatttgcgcggttggcttggctgtggagtaggggaaaggccggcaaagaaatcctccacgctctggaggtcaggtttctggcccataactgcgtcttcgcccgtttctttgtgccgagtatcggggtcctcccaatgcactcttgacactccatggggatacttatcgaaccagtcaccatattggaacatgggcgttagcgatgcaccattctgagttgccacagagcccttgatagctgcatcggcgaactgccgataccgatccttggcactctcaaccatatagtgaaacatgccccaatactttttcattttattgagatagcggtacgtatgccgtaggttctcttttgaccgtgcctctagctgaacgttcttcgagaatatcccccagatgtggactgtacttgccgagtaagcacagtatccagcaaaaggaacagtgagggggtaggctgaagcccgatcaaaaagcactgaaatgtgatgcgccgcttccaccgcggctcgacctgcattactgaggaaggactttggcatatctcttggtggacgcccccccggggacaagggaatggcgaactggttgagaaacagcatgttttggtgtatgataatgtggaggaaaatgaattgatttgcaatcttctccgctgcatggatttgaagatgctcgtaggtgaaggtaaaaggcgccggaagagacgcggagaactcctcaatttgccgcttaagctgcatgtaccctgactctggatgccaaagtggatgtaagtccttactctttccacctagattcaggtagtcgacaatgcgcccccaaatgacgatagcgcggataatgtacgctgaaacacccatgttttctttagcgttagataattggccggcatcgtcaggtacaggattaagaatatcgccatcaagatcttccgtcggaccaggtatctccatctggaagtggggttccttgataggaagctgtatttgtaggaacttctcattcccaataggtggccgttggcttccggaagagttataccgatccatcaagtaacatgcccacatagtccggcgccgaatttcttgatctgtgaagctcaactttgagctgttgccattgttctgactgagtaatggatcctgatcaagctcctgatggagctgcaacgcgtatgccatccgtaatgcttgacctccaaaagaccaacttcgcccaccatgacatgtcccaaactcatgaagaccaagaagtaagaagaccgtaagaattgtaatgttcggctcgtcatgccggctcagagcgatggccgctgcaggattagcccagttttctccacggaagaatggcggatctgagttcagctgaggatgtgtggagaatcgcgcagatacggcacagacagcaagaattaggacagggggaattgtgcctgctttgagccgtcgcataaagctgggtttgtgtaataagaggtatgactgcccatagacacaatcaaaaaatacctccgcaagatgctcttgaatctccagtgagggcagaaactcagctccttcgataagaagcccagtcccatcggtggatttaggttcacgattcattgggaacgtctcgtgtggtgggcggctgtgcccacgagtccattcatccatctctgccgaaaatgcctcatctgcggttcgtttcttctgtgcctttgacggctgagccgaggcagaaggtctgacaaccgatcttccaatagaaagcatatcccttgtctcctccttaggtattgtcttgattacgcgatcttccatcctcttcagtcgcttgtccagcatagccatataatccgtgcgcggcgccgccttccgcgtagtaactttataaacacacggaatcctcgagcgcgtacaatgcttgcaggcaggcttctcgcccgagcagcggattttcttgcggcggcatgcgatgcatgccagtggcaggcgcttccgctccttccccgccttggtcttcatctcgctccaagccggtttatcgtcgtcgtttagatgttcaaaattggacgggccgttgccggagtcgtctcgtccgttgtctgggcctagcgcggggtcgacggtttgtgtgctaccagggtcacgggaacttgcatggctttgggtatcgaaatcctcgagagctgctgccgcctcctcctggcctacatcaaagctgacaccaggggttttcgatggcaattcgtcgggagcgggttggatcatgacgggtgcggataccccaggacccaagcccgaagcatccttcggcacggtcggggaaaaaagaaggcgcttccgaaatggagcgcgaggtcgttccggggaagatcaatttggagtggaatttgaagagcggggaagaaggagaggcgaaatggaggagaaagtgaaatcagccccgaatatggggaaaaggttcagcggcgaatggtggcttggcaaataattacaattcggccactggcggcgctgatattacgagactcgaccacaatctttctatattggagtataaagaatcaatgaagtctgctgtagctcattgaaaacacttgaaacagggaaagtacatacgcaatcgacttgaggttattggattcggaggcgccccaaccctatatccccctttaactcctatattattcccctatagttctacgtctgggaatatatttgcaatctaattccacttgagccacgcatattaaaaatggccccagactcataataccaccttcatggatatactcgcagtatgcctggctctctcaggacggaccgggacagccggattggcatacgggctgacacatcggaagcttgatagaagactaggactagcgtgcagctacatgccaggggatccttattgagtggccaacataataagatagttattcattgatcatctcgagtgcattacagaagcaggaccccttttttttctcttagactagccatcgatcggtaaatgccacctaccgatagataggccaaagtcgtctggtttttttctctcaagagtcgctagcgtcatttcacgtgtcgcatttctgtacgcaggctattctctagtttgcgcgactgatcctaggtggatttcgggcgtccaaccttatggcgtggtgttgcgagctcaagcgagttcagaatctcggccccgagaacatagatattgtagctgggaaacacgagccacagcccactgaatgatattagtgttatatttcatgtaaacatgcactagacggagctcacttagggaggatccagtagaggaacagagtaagcgggtcgttgtgaccgatgttctcgaagccagagaagatctcgttgagccctattttgttttgtgttataatccgacacacaaagcccaggaaatagatatagcttacagtaaaggatggtcttgctcagggtcatgacagacgcggtgtaggcgaccagaagtgcggtcgcaccaatgcgcccagcgacgaccttgtcccccttcagcaaccaggtaaattccttggagatattctgcgatctgccacctctcccaaccgtcgatccatagtggtagacaatccagaggtaatagatgtaaccgatagtctcgaggacgttgagcatagtctgtgcagccgtgaagccattatgcgcattgaaggctggccagccatagatatagtccacttttccgtacagcgcgtaaggcgtccagatgggagagtgtagacttccaccgggcatgctatgtggtcgcaacaagacatagcctgtgtcccatattaccaagggaaccgaaacaatgagccagattgtcagcgcagcagcgggcgtatgggtccatttgcgcgaattggcgctggtggtagctgggggtaacttggctagctctttcccgacctcgggggaggggaattcgcggggatggtgtcgcgtggagaccatgatggaaggggttgcaatgaataatgtgagtaggacagagtcgaatgcaatcctaataaaatttactatgagagggggaaaagttcaggtagaaaccagtcaggcgcagaggaatgccgggggttacagctcaggcgcgactgacggccaatgacgtcgagggtgatcgtttgccatttttcacccgacggctacttgcctctcgctctcacttttgtatgcggttgaattggaaatctgactgcagattttggaaattagcgtgaatttcgttgggtacgtatatgagcgtgtcacatatatacattacatatgttattgacgcaaatcaacacacatcgacagtttacggtaccacgagctaacttttggcatttagtattagtaccctggaataactggttaactaattagctctgaatccgtttaggtcatcggatcgtaaactagttatcaaactcgggaagctgccacctatcgtctattctttcacatctctactcatccaacgtttcaggtttatcaagttaccaaattatttcaaatgatcaaactacacgccatcggtcgtggcgcctgcggcactgtatgggcatgcgaaacaggacccgcatacaaaagggaggacggtaacccagcacgatccctccaaaacgacttcgaaatgcacaatcgagtacttcaaagtcgacaaacccttatgaacctgaggaagtcgactcaagttgaaatacaaataccatcctgtcacaactttatcgagccaaagaacaaggagtggtgggctgcacatctagaaagggttccacaaggctatacatcatgcaatatgatcgaagcaccaacgcattccaccctttgggggatcaacccgacaccttcttattcaagcattctacccggatgagatcaaacaaattattatcgagagtgagccggatcgagactgcttaattcgactatatttaggcaggcgtcgaacacatatccaggattcgaaaaccttctcacagttccgagcattctctttgcgaaattacccgctacatgaagaccaactagaagagctggcgatcacaacagacgatcttcaacaatatgcccgaacaatggcagaagcactcgctatgatgcactggattgctggcatagatgctaatgatgttgagtttgtcctcgcaacctacaatgataacgatggtggtcgcattaataatgttttgggaaggcatagcatgtggatgctagacttcgatctatgtagaaatatgacaatgggcgagaatggtgttgcaaaagccgtgaaggccttctagagaaacgatcctttctatcctcgtccgggaaatgccctatgggacacattccgagagaaatacatttatataccagtgatgagtgcctggagctttgtggcgttgaagaaagggaaaagcggcgattcctgtcgaggttgtttattgaacaagtggaagcctggggcaccaatgccaactcttgaaagtctgtggcagcctgaataatttatctgtggacccagaggcaaaaatgtagggcaagcatcatagcttgagacactcaatagtaccacacactgcacaaagagaatcgtaggaagattaaatatgtagttcacgtgacttcaagaaatgtccacgtgactgctaaacagcagccataaaaactaggcaacgacgtgaaacatcatttcggaggtgatttcggagatttcccgaactcgaaattcaaaggagggactgtcaaactgcccactactcattctaatgtgtgctttgtatgtcaagtttaactgataggaagctcggtcatgctccacacttcggagtcagcaactgatggattcaaccaaagaacagaaggtcagtcacatccgttttgagtagatgcggtcaatctaactagcatagaagaatgtgcgactcgcacgggtgcgtgaaaaccagcgcaagagtcgagcccggaagctggagtacgtgaatgagttagagcagcgtcttgcggtgtgtaaagaacaagcccgccaaaaagacatcgagcaccgactagcaacgcaaaatgtcgaagctgaaaatcggcatttgagaactcttttgggatcgctgggagtttcgagtgcttatgtccagcagtatctgcaggaagcggatacgggagtaaacaccaaccggaaggttgctatccccgccattcagcgagtagagagagataatcctctatctctatcgcttcgtgatactcgcagatcaaatttgtcgatggcagtaccgcgcgtttacaaagaggaatcaaagacgactgaactaccaacagcggttagtagtacgtgtgccttgacagtggtgcaacgaacagatcagccgtcaaagcaaaacccccaagaagaagatccggctttgtgtggatgccgctccgagagacagaatccggaaacggtatctgacgaagatgtgctcaattcgacgctgtgtgccattgcagaagaaatgatcaatcaatacaacaccaaaggaattgatgtcgatgagatccgacgaagaatttggtctgggttccgagcaggtgcaaatggcacaggctgcagagtccagaatcacattctgttccaagtgctagacgatatcagcagtgatgtctgactttggcattgacctggcttccacagtcatttgggatattagtatttgagtgaaactgctagttgcagctgcagctgtctttgaatttggccaaaggcacgaggatggagatcacagtttctactaagaatcgcttgcaatcatgtcatcttgtcatctggaggagtgagccttgagtataacaaaaccggtctagaacccaccaacgcctactaaaccaattgctctgttccgcactcctcggccccataccctgaatgcgacgcattctatgcctcaaaattataccaatatgtgggaccactctacaccgacaagcccatgcaggatatttctccggtccaatccaccccacccccagatccagatgaaatgggcaacagtaccccgacttgcagatctgaatgagagatggataataacccatagccatcgcattagctatgccgatgatgcaaatgtgtttcatattttccgatgtagcatcccaggccacaaatagcagctgaattaatgagcaccacctatccaaaaagaattccagtcagaaagcacaagaacaagcccatcacgctaatagtaccccgcaaaccattcgctcctgcacgagcccccagactgctgaacacccaaccggcaaaagccctggaactcaacaatattgagccggaacattgataattagccggtaacaccgatgattagccgcaaatcaggaaaagataactgcttggcggtgcattccgtgagggatcagcgttgttcctcataagtttttctaattgcgggcagtagagttctgggatagtcagacttacatagagaggtgttggagcatccctaagtcaatgcggggtccgatctccacggcagcaaaaaagcctagctacggatggagcagtccttgttgtgccacaaagatgtttgtgtaggaaatagacaatgcatttatgttagagcgaaacatacagcatgctgtcttgaagccgaacagaaatgcacggaacacttttgtaataggattgttagcattgttagcattgagaattgagaattgagttcaggtgtgcttccccacactctctcgaagtaacgtaataagaagggtttccccatccggcaggacgagcggtgatcagttggacgtgagaagatggctagatcagattagaatattgaaagtcatctccgtatatttatttgatcaggtaagagtggtgaggtatctgccacggaatggttaggaatttaggatagccgacattatgtgtactccatagttctactctgtataccaccacagcataagaagctgaattccaagaagaattaccaacgacttttttgcttgttcaatatataacgaataattagaattagaattagcggggaagaggcgcgggcgcggtgttacgatcgtcacgacgtcgacgtgagacgccgatatttcgccgtcgtatacggaatcgaagcaaggcgatggattcggaaatcaatggctctagaagtgtactccgtatgctgtgtcgtgtaaaacggagtggctgggtaattctggtgatgtacttgggaaaggggttgacttctcaccctgcgtttctccttgtctcgaccagccacaatttgtaccttgtgtcccctttcaaggatgagtgtctctccaacttcaatgagactacggagtacatactccataagaataagtcatatccaatgataggacacgatataatgtgattagtgggatagtgcatattttgtcgatccttttctccatttttattatttttgttgatctcatttgatctcattttatggagtagatatatacgctatgcattctattatagcccctgtgagtaatcaggaaacagaacatttaagatcccagtcttcccctccgagatctgtggcttgttccttcctcacgccctcttctttcaatacttgtgccctgtgagatcctatccagcgctttcacagtaatgaagctcgcgtggtttgaggtagccgccttgtcggcctcggtgaccagtgccagtgtgagtccaatttaaacggttgacaatatcactgctaaccaagtcacatgaaaatagtccctggcctattctcctccatactatccctccccatggatgactggcgagggcgagtggtccgaagcatacacccgagccgtcgagtttgtctcaaacctgacactggccgaaaaagtcaacttgacaaccggtactggctgggagcaagaacgatgtgttggtgagaccggtagtattccccgacttggcatgtggggaatgtgtatgcaggactctccattgggtgttcgctctagtaagcttgccagttccaaataagcttgtcgttgcagttaactaatgagactggaacaggtgattacacctctggtttcccctctggtgtcaatgttgccgcagcatgggacaagcgacttgcctaccagcgcggtgtggcaatgggagaagagcaccgtgacaaaggtgtggatgtgcaactgggtcctgttgctggccctctagggaagaaccctgatggcggtcgtaactgggaggggttctcgcctgatcccgttttgactggtgtgatgatggccgaaaccatcaagggtatgcaggatgccggtatcattgcttgtgctaagcacttcattggaaatgaacaggaacactttcgtcagcccggcgaggctcagggattcgggtacaacatcagccagagtatgagctcaaacattgacgacaagactatgcacgagttgtacctctggcccttcgtggactccatccgtgctggtgttggctctgtcatgtgttcctacaatcagatcaataacagctacagttgcgcaaacagctactccctcaataagctgctcaagggcgagcttggcttccagggatttgttatgagcgactggggtgcacaccacagcggtgtcgaatctgctctggccggtctcgatatgtctatgcccggtgatgtaattctcggtagcccttactcctactgggcaaccaacttaaccatctccgttttaaacggtaccgtccccgaatggcgcctcgatgacatggctgtccggataatgtctgcttactacaaggttggacgtgaccgcttccgcactcctcccaacttcagctcctggacccgtgatgagtacaacttcgagcactctatggtaagcgagggctggggcaaggtcaacgagcacgtaaatgtccagcgtgaccatgcccagatcatccgcaagattggctctgacagcattgttctgcttaagaacaaggctggtgcactgccccttacccataatgagagattcatcggcattataggagaagacgcaggctccaatgcctatggcgccaatggctgcagcgaccgtggttgtgacaacggaactttggccatgggctggggtagtggaaccgccaactttccttacctgattacacccgagcaagccatccaaaatgaagtcctggaatacagtaacgggcagaccaacgtcttcgctgtgactgataactgggccctcacggagatggccgcccttgcctcccaggctgatgttgccctggttttcgtgaacgccgacgctggtgagggatacatcagcgttgacggcaacgagggtgaccgcaagaacctgacactctggaagaacggagaggagatcatcaaagctgctagtcagcactgcaacaacactatcgtcgtgattcacagtacatccgctgttctgattagcgattggtatgacaatgtcaacattaccgccattgtttgggctggcttgccaggccaggagagcggtcggagcttggtggacgtattgtatggtcgtgtcaaccctggcggtaagactccatttacctggggtaagactcgcaaggactacggccctcctatcctcacggtgcccaataacggtgtcgatgctcctcaggttaattttgaggatggcgtcttcattgactatcgccgtttcgataaagacaatacggagcccatctacgagttcggttatggtctgagctacacaaattttgccttctccgacctcaaggtcacccctctagcctcatccgaacagcgcgagtacaaggcgaccaccggaaagagccaaaaggcccctgttctcggcgaagccggcaaggtcttggataacctgttccccgagggaattacacgcgtccgccagtacctttacccgtggttgaactccaccgacttacgtgcatcgtccggtgatcccgactacggcatggactccaaggactaccttcctgagggtgctaccgatgattctccgcaggaccttcttccctctagcggcagctccggcggcaaccctggtctgttcaaagatctctaccaagtgaccgccactatcaccaacaccggccccgtaactggtgacgaggttcctcagttgtatgtctccctcggcggcgatgataatccctcaaaggttttgcgccagtttgaccgagtcaccattgcccctggtcagaccctgcagtggaccaccactctgacccgtcgtgatgtctccaactgggacgttgcctcacagaactgggtgatctccgacgcccagaagaaggtgtatgtcggcaactcatcccgcaagttgccactatcggccgacttgccctcggttgagtaaatgatcttcctttttggaatggaaactggaggataactacacatgtccacatgagtcaattctcttgatgttgtacagccaacattgcgtttttgcacatattctctttttctcaagacatggctcctgtgactacttccatagctaatgaaactcattaatatctcttatgcagttcgttcacagaggcatccaattgctatctgcagaaccatacttcaactcggacgtaaaagccagacatccattcaatctgcctctcaaccatatctctcacaaatttatacaccggtaaacccgtaaaatgcaatccatccgtgtccacgcagcaccaccctccgcaacaacatattcccaaccaaatccgaccgcctcaaatcagctcctaatccatatcaaatcaacaaccataatctgcagcatgctcacatggcccgatgaatacaccgaatttacaccatcccagagcacgacttctcaggcacagtagcatcaatctcccaagcttcaacaacaaccctgaaacccgccgtcttcggcatgacctccatagaccgcggctcaacatggtcatcgtatgtgcttgtcacaaccaatgaagtcgcactcaaaccaacaggtctcgggagggaagaggctgcggagttaccgctttgcgcgcagacggcgtacgaggcgctctttgtgcatgcgggtcttcaacttccgcttttgggcaggtgtgcgctgacggaaccacagtgttaccaggagcaggatcaccagcatgcttggcagttgggagagcgcgtgcttggtactggcgctgcgggtggtggtggtggtggtgtttttctcgtgcaacttgctgcgcatactgagatgcatgttgttagggcgggtgagtctgttgcgagattgggacgttttgatggagttggggatgaggaggttattgagtatgcggagtttgtgggacgtccaccagggtctgtttgatgttgttgttgatttggtgggtgggtatgtgtcgcagcggtgttggtagtctgtgaatgaggaagttgtcttgatatctgttggtttggcgagcttttgttttgtcgaggttcatacaaagcgtaagttgagaagtaatagagttaaagcgtgatttttttattcttgagggaagtggagaggtcttgcgtgcgcgacggcgagagggaagttgcagtcatttgttgctgccaatttttgcttataattatgttaatggaagggctgatgctcgagggaaggttgtgctttatattttagattcactagatctatgagcattgtagcaattccaaaatcactagagctcgcttaggtagaggttaaatcatcttcccagtataaactttccctggcaagctgtcaaaacgtcttcgcggtgtgcattagagagagatacacccctcaagttcaaggactgttcctcaaaagtcggtatgatagtgcgcaaaaatgccttgaaggaatcataggtgatttcaatgcaataaagattagttagggatttgttgtgaatttgagtgtaagacacgaagggcagcagagcacaatggtcattgctgcatatgtctgacttcttgagtttcctattggaggcaaccgctgcctctagaagagccgaaaaagctatagcatggtacttgtgtatggttttctgaggttcaatccgaatggctcgaaatccaagctgatgtttatcccgcgccggctgaggaacccggcatcattctttgcaattggatttgtatctcgggaaaaagccgagtgcttaagctgcaatcttatgatagtgtgattcttaagcgtatcggatttgattatgttgagatgatctgccactaaagcctgatatgcagtacgctaagcattaatctaggtgacagtattatgtggcctgtctctatgtgaagtggtgcacacttgaagaagtcaaggttcatcttatgaaagccctcgaacaaggatgatacagtccatagctcttggactcgtgttcggaggtcaacccgtttagtatgagaggtctgccgtcacaaattatcttttagtttacaatgcctctttcaaatccattacacttgcggagacccgattattggtgccagatagcactccagcagaatgtatgaccaggtatcgacctccatcctccgacagcactcgtagagaccgtgtgtagccgtgctcttcgggcgaagtgatctctgtccactctccttcgccaagagctttgttaatgaacagagtactctgtgtgccggagctggcgataatagtgccgtttttaccaccgtatggtgtccacacaacgtaaggcgaagatgtcggccgagtaccactcgagacaactagacgctggcctggggcggaggcgattttttcggggtcggacgacagacggtagtatatagggaaggagtagcttgatgtaccgaagaaggagccatactcatatatgtagaagtattgaccgttcgggagctagaaatgttagaattctccgggtatgacagaaacccatcgtaattgcattggtgtcttgggtttagcttaccttggtcagaactggcatgccgggtcggtcggtatatgtcgggtaggtgacatcctctacaatatctccccagttctttaggtcagttgagacctggtgaaccattgtctgtccgtgtgttgcattatcccgctgatccgagtaataacaaatcaacttgcccttactgtgaaaggagttagggagttatttcaaggcagaatataagaacatactgagcaagtaggaatggctcccatacaggagtcagtccattgttcggcagtgcctctcctccggcagcaatatggctaacaaacttccaattcacgccatcatcttgcgacgcgtaaagatcgatgtgtgtggacgacaggtcagttggaatactactaccagctagaagtagagtgcctttttcaaatgaaccgatgcgctcgggcagggagtagaggaatggctggtaacgcaggccatatccgttaacagtgtcatggaccttggagatctcgttccaggtctttccgtggtccttggagcggtatatggggaagtaaaccgccggtggctctggagagtagttttcccatgttgcgagaaggtcaccattaggaagctgctcgttacgtgggtaaagtgttcgtgggacgatgtagtcggagggtggtgagaagatggtcacgtttgtgagcgggacaggagaagattgcttggagcgcgagattgtcactgcagctgtagctgcagcaaaagcaaggacctgtggaattctcatgtttggtacatatgttggaactggtattctatatctccattggcagcattatcctgcttttataaccgcatttcgtaaaaaagaaatacgggttgattttttgagatacatagtatcccggggttatcccaccggaattaaccttattgtggactaattggagtgtatttcatctgaagaatttccgtcaattacggccatcgtagataatccggggaaatatgaaatgacgacatcaattgccaagatatcacgtggcatcacgtgatgaagaacatggggtttccaccattccttcggggctataccccgtcaggatcgggggataacctcgtatcgaccaaaatatactttgaaattcgaacctttgaagtccacgccaattgggcagcacaagcccccaggcagtttggccccatcatccaaagccaaatttagaaatgcccgaaaagttgaccaattatgagtgtggatctacattattccaactacgttgcctatcagcacacagccttacagcatcgccacgttttgctggcaaccaacatacctgaaagtggttgattgggaaaaatcgggctatgtatcatgagaaacttatttaccttggattgcctccatctttctgtcttccagatttcacctttctccaagacatccaagacagaaatatccgtttccaagttacaggtgcatttgtcttaaaatggtacctaccgacttcgcacaccggccaaaagcccagttgatagggaaactgcaacaatcgacgagggacctcatcagtcgttcaacggccatgtgggataattcaaagtatcgctaccatcaatcgataatggaaatcaggcacaaaccagcaaacacaataaataattcgacggataggtgtcaccagtcaactgaattgatgctatatcgaccggtatcaaaacggaatcagtcagcagaccagttacaccgagtcgctcgtgttgaagacacaacacaacaggttggagcacgcgatgggcaaacccaagagcaaacgcccccacaatcacgattttattcacgggcattcaactcgcagtcaacaaactcatctccaaatcccaagaccacgtcacgctccacaaaagtgaaatcaatcaaatctgcctcggtcaccggaccttcactatctctggaggagcagatcggagggttttacaaagcaactatacttgtcaggtccacggtgaagcaggcaagacagttgcgggatgataaaagagcactcctcggcgagatcgagcttgagtggatcaactcgaccatcaccggtgccgaaactgccgccaatgatttagctgcgtctgtgaagcgattcaaacagagcagcccacagaaccgctgcagttggaagcgtcgtgactacgaggtcaccctggaaaaggaatcccgtgtgcttcttgctcatgacaaagtcaagacggttcttagccatcttggctcactacaactcaccttgggcaaggatgaattatttttctctccatctgaggtttcaatggtcgcttctgcgattttggaacttccatctgagacgactgttctatctgactttgagcttttgcctgtgaaacctgagcgacctataccgaaaatcgtggtgacacaatatgatgacgataatgaatactcccatagctatcaaagttcccctccaagctacgaagcaagtggaatgaatgccatggcagagtttcggtgatcgtaccactgcatggcttccgaacgctgaacaggagcggtgtgattgttctgtaacttatgatggacgatacgacatgaataatggatcaaagttttggctctatagttacattaaattcccagttcgcaagcttcttggcttatgtcgatccaatgcttctgcctggtcaatgaaatctaaataaagccacaccgcaaaaatacacccaaagtggacactgcgaacaacatctaaagacgcgactgagtattaagcgcgttgatctcctcaatcacagtgtcgactgcctcaaccgccattccgtatccagcctggtaaccggttccaccggcgccatagttatggacaacaaccccccgacgtcctgaagcgcctactttcacgttctccctggcaacgcgagcgccaccctcgcgagatgggcgtagcccagcaaaagcaccaagaatctcagtctcgcttgagtttagagcaggaagcaaagccgttgttcgagtaaggattgattctgactcttctccaaatgtatccggtgtactgttgatatagttcagttgctgtcatatggaacacccgggagaaaatcccaatggactaatgctactgggacaaagggctgaaaggaacctacttacccaacattcttttgcatgaatccaccaaggatcacttttccattcgagtatggtcgaggtatcacgtaggtttcatagtccttaccatgtctcatgatgttttgttgaacatgaggtgcttttgcaagcagaatctgacctctagtgggaaaacactttgagtcttggactcccggtaactctttcgctgcattgccagtgcagttgaataccaccttcgtatccgtgctgatatagccggatgagactttggataactttttgcgaatgactcgcaccccatattcttgggtgagcttctggaacaaataccgaaggtgcattggtgcattgagagttattgttgtgaactctataccaaatgcaacacccgctggcaggtcgtgtgtggcaatctgtttgaactgttcgatggtaatattgataagcatatctagggtaagcaaggaactcatccataactcacatctttgagatacgcggccatcgaatcgatcttctcatgggctggaagctcatcccaatactctaccgatggtgtttccttcacaaatgcattcttgccatccttggcagcaagatcgagaagatacatatatccaattttgtcccaccgcaacgcatttgggtcgcttgcagaaatagcagagaaattggcaccagccctgaattcgggttagtcgtttgaatgtgaactggcagcaggagcccaacataccatggtgatgtgtaatttatggaagtatctcctggaagatgttctgcaatgatggttatgtactggctatagcccttttcgcagagaactagggctacatttagcccgatcacgccggcccttacaaaaatcagtatcaacaccccgaaacagtcatgtatgttttggctctcacttacccgatgaccactacagattcgcttttcatattctccggtagatttattgaccttgaatggaatttagtttccttatttgtcccttttccgctccgtttgagagctttaaatactttacaatcacagttctttggattagatggtctgattgatttaaaccgcggcaaagtccgcggtccatcccccgcgggctaattgagggctccgattggcggcatggctagtggggacggatagggactggcggggacaagcggtatcacatatcattggtcaatattattctaacatcgatgagcctcatcacgacggacagtgatttcgacgaccgatggggaatcattatacggctatggaggtaactctgaaaaggaattcgtttgctcgggaaattgattcaattgtgcctagaacccactttcaaagaagagagagagtaaacagagggcaaaataggtaaagtctggcgtgttttctttttccactgtctttcatgagatctttccaattctctcagatatagtaagaagcacaagatctggaattttataaaccactctagtcctacagcagatttctaccgtctatgatgaaatcatctcttctcaaaatatgatcgctcgagtacgactgctatcccaattctaatcggagcctgctaacgtcttcggtcagcgggctggccacccgtagacctcaggcatgtaagctgattgaccgtcccaaaacacaaagtaaatgcaacgttatatcttggcaaccacgtttctatttagtttcattacttgtcgatagctatcgacaaccattctcagtagtatatatcaatttcagataaatcgaaaatttacattattatggtattgaaaattacatcactgaactctagaattatatcacagtcattacacatctttattaggtttcttgaaacttcttcgagtggctagatataaaaaaaaatctcgaggctatagaaaaaaccccatttagaatgtcattgttgatatagttcaatatcaagttgtaatttatctcattcataatttagctactggccagcccggggctagtaacatccccgagctggaacccaggccgcttaggcatcgacttcgggaagacccgtagacgttttcggtgtcaagacccactcactagtcctaggtagcccgatgtaattttagttatatgcccaacatgttccatatctaattagctcacgtctccagggttctccctcttacggtatactcacttcttcttctatacctgtccgttttctccaatggtgcatgttgccgtgcttccacagccaatagaaggactcatctggcgtgaagataagaacttgctaatacccaatattggcaatgatctcatataatggaaattattaaaacaacttcaagacttcaagtatcaaattcaaataggagaaaaaaaatgcctcagggtagatgcggagatacctcggcggtgatatctcggtattctgtcgggtgagaccggttcacaaatttcagacgacccctacttcacatgtcatcatataaaggagcgaaaccgccgcgcaaatacaaatcaaacttgagatcaataaatttacggattgtcaatacatcatgtttcaacatattgatcatatcggttcacaagaatcgatccctagaatgagcaagtcagagtcctcctccgtcgtgaatctcaacgccaccctgcaggagtcacatccttcacctctccagcgcttgaaaaaacattggaaggagataaaaaaggagtggggacctctcatggcggccaaagagagcattgatgacgagtacactttcccaccgggccgttattgtggacaagcgcacagatagcttgacaatggtgagtgttttacagtctgccgcatacatcataaactgatctcatctaatgttgttttgaagaaatatacaggactcaatattcttgccaagatgggaaaggagtggaactttttcgagatagggaaaggccaagtctttcctaatacttcgacgatcgtggccatacaagatatgcgaccttcctactatcaacctggccagttgttttccacaagcatctcaacttcttttctttttttttcatgataccgacgaaccccttcaaaataatggcgcttgctttgcgaaacatagatggggactattttccaacatggcgttacccttctttcggtcacatttcgctagcggacctcttgggatgttgaggatttgactatttccttcaagatagaacgataattcataacttataatattctaattcacatcataagtactgctgtctgcatctatatcttgctgtcgacctcgaatggagctactaagagaatggaaagaaaacagaaaataagagacagaaatgaatcagggtggcaaaaacaaacagaattacatattttcatttcccgctacagcgtatccgaagcgtatcccctagttaacaaactatagttacagtggtgtttcatgtgtatttgaccttgagtacttcggcctgggcccactttgtaggcccacttttaatattgctaggcagaaacctccgaaattcaatccaattcaattagagaataagaaaacagtgcagggcgcgcgaggtttaatatactaatatagtaggcggtctaaaatggcggtcggagcctaaggtgggactcgaagtacccaaggtcaaatactcatgaaacaccactgtacgatgaaagttctttgcctgagtatcgaggcattaatagtggggatgttagtgaactacgcttaactctaaatttagaagcatccatcaaacacaaattctgggatgtgaattttctattcagatcagttaggcactcataggttctccgggtttctggccgtaaaccacccgcaattttgtgtacaggtgatgcgatgtatctcgcagctccattcgaattcctgccaacagcccttcaatctcggagcgtgtccacccaagcactcttgaaaacaacgcatatgtataaataggcatagcttcaagcatgttgagctgatggtaccgaccaaggtccttgagcttggggtctttaggccatggactctggggcagctattcatcaataagcaagcggttccattttcgttaagagatggcggaacataccttgtagatatcttctttgacattcacaaacccagccttctccatccgcgttttccaggatggggacgatgtcatatccttgccaaacatgcgcgctgattcatgcatgtgcttgatggataagagaaggttggttgcgccaaggtgagttccgtcgtccgaataagtgttgacgtcgaagctcgctatctcaaaccatccattgggattcaggttgctaagtacccgtttgaaaagaaggtcatggtcacggatggaaccttccaattcgcgtccatggatatagtcaaatggtttgctgtacgaccatggttgttcaaagtcgtcaatctcaaagcggcagtttggaggcaccctggacatatatcaatattatatagggaaccaacatagtagcagtggcacataccatgatggctgaatagcacttaggtcaattcctatttcaattagccaaagatttgatcaggatgtaggtagatgctcataccaatcacctcgcagtctggatttgtactatatttcttgttagagggtagactttatatattggagaagaacttgctctgcatattcgattgcccataagcctgttcctgtcccgagatctagcactcgctttggatttttgattggtgcttggaacaattctcctttgaggagcattaggtaaatgtggtggctctgttgctcattaaaatttttgtgtcatcagaatcagcaggtgagaactaaccagatcaagacggtcttgttcccgttcatcatttggctgtttggacattaggctaagacagagagtaatcgttgatagggtcatgtaccaaaatgtattccccttcatgatatgaatgatatctgcgaccgttctgtatctgatcagcacagttcgtgatccgtgatcaagtagcgttgtaacacacttcatatctgcgattattagcaaccattgaacaaatatttcagctacattaacatactgatagtccagcacgctcgatgtgatacttgtggtgtaaccggcattgtcaagtctatcagggtcagtagatatacacaccatcataagtcactggtcttacgaatcagggtatgatgaggcctcggcatcggactaatgatgttagttgaataggaaatagtgcacaaaaaagagaaacactaacgtcaggttcaaccggggtcgatccgtgttgtgtagctcgatgcatcttcaatagtttcggtctataggatagcacgcgaactcagcgaaagcgcgttataagtgatcgaagggatcaggaaaaaagtgaaaagtgaaaattgcaggcacaccgattgcagtcctaggaccccccttatgacccctctgtcttcgatgcagctgttagcgtcccaggttgtcgggtccagcgttaccacgttgtatcccacgatgatttgcaccgtcagccggataagtactcctttgagtaaagagggccgctgtaggacgtacttttttccttagagtacatatccccgtgcaacgtgcaacggctttgaatggcgttagttggataatctaagtggttaaacaacaatctagcgtattgatcgccctaagctgattagctcactcctgtgtgatggtccatagtgctaaaaaggggctgtttctcggccaatcaggggtgtattgcaacgggtggaggcccacaaggtgtaatttgtaccagccacgccccattaggtttggctgatatctactccgtactatgtatactaatccagcaataggtagtttatatacaaattccgttaatcctttgtgtagactcggggttgcaaagtcgaactcctactacaacgaagtccgtgcagtgaccacatcagggttagagtggggcggacaacgtaattgtttgtgagtatcccgtacttttgcccaagtcctcgtattcattgtcagaaaagtgttcaattcgctgctagtaacgcagtacttgacaccgtcagtcccgacaacttggtcgttcgccactaggcagcgtacatatgtgaaggaaagacctcggaactcattccactcatcctccgtgaagatagtcgcctcggcccaggtctcaaatatcttctagagttaagaaattgtgatccgtaactaacgcattgatgttattgctttggggatgcatataaccagtgctctagaactcgaattcttgggttcgaggcactatcacatgctaggtgtgtgatatttatttatataacttgtcggagacaacgagtaatcgcggaaacgcacaaggctacggacccggtacgataaatccaaagtgcagagagactgaactacttttaagtactttttacaggaggcgaagcagctaatcctaagtcgagaccctcaagaaacatatttttgaatgactacggtgcaagtattttatctaatatgtcatgcataaatcatcaatgaaagatatattaattaattcagcccagttctgcatttataagaccatcaacagcaatatctattagatgtattgataaagaacgttctatcaccgagggcaaaaatgatagttttttccttcaaggtatttctccggattttgctgatagaaataatctcgaattcataagttgcctagatgaatgaggcaaatgggtgttcaaatacccagcatcctctatcgactcgaacaaaagtccggcatcctttggcatggtcgcatgttactagtgcaataaagatacttttatgtattgcatcagtggcgctcacccatgtatattacccaacaaggtgatattcgctggacctgactcgtttccccgcatggccctttgttcagggatacaaagccggcctctggaagttgcatgcaatgaggtgaatatccctaaacgattggttggttttgccctaaacatttattgctctcgcgttgctttgattgattccattgcgtggtttcaacatcgagtgtgcctgccaaagaaggaccgaagtggccgtatttcaatttcttactctctaggtgacttcaacgtccattctgtgattactagcttgaaaattaaagcaatcgatcttcttatacagtacaagaatagtaggccacatttgtggcctctgtcgctgagaatgatatgttccagtatactagtcattttacatgttttcctttatatagaaagcttgctctccttaactttcctaagtagacaggcgcaggcagaaaaaggcttagattgtatctatagcctttggcacaagagcgggagatggaaatgaacgagatgtgcacaaaaactatatgcatcgaacctcctattgagtatcgctattgattgctgatgtcaaattactcaagtctcttgcttagaacagcaccgtaccagactgtagcaaccaggctgatcaaattgaccaaacttgagatgccatgcacgcggccgaacttcttgttcagagccagcatctccttggaatggggcgccgggtcgtagctcctctttccatcacgagtttctgcgaaggttagaatattcaattgaatgttacccaagcatggtggcagcagctaacgcaccttgatgcttgcgctcgcgcatcacgttggtggtgatgggacgcaacacgaacatgttcaccaatccggtcactgtcacagttgccagaggcaagagagtgttaaggcggttctcgggtgcagcgagacctgacagacccaatacctgtcccccgtgggaagcggtcaaggcgaccactataggtagcgcagattgcagtgagaaatatatggggaagatggcggtttgcagattagcaaactgaggccgcggaagggcgcggaaagcaacgaagcctccaacaaaagacttcggatatgtcagacaatgcttttagaggcgacgattcgaccatgcgtccggttcagatattgatctcacctggaagaactgtgtccctagaagggtgccgtagctacctcactcattagcatatgagccatgacgttcgctaataaacaaaccttagaacgtgataggggcgaggatccatgatttcggatatggtatgaccttggggaagttgagttgagttggcgataaagttgatgtgaagtcgcaacgaggggaagaagtggtaattatcgctacgacccaattattaatgaaaccattatttccactgccaatcaagcgtatctgacttctaacgacgcacagaccaccaaaaaccgacaaacacagcgtgtgatgtcatgtgccttcgtgtttcggtctaaaccgcaaatggaaatatcacgcgtctgcctattgtctttgagcctcgagcaattttgacttgccgttttccccaaacaccaccatcaccatcatcatcatggcggagaaagaggctacagtttacatcgtagacatgggacagtctatgggcgagcgccaccacggccgtcctatgacagatctcgaatgggccatgcagtatgtctgggataggatcaccgccacggtatgcgacttggctttgctcaataccaggacactaacaatcctaggtggctaccggccgaaagacggctacggttggcgtggtcggtctcaggacagatggtaagtggtagcctaccagtcagtacccattgggagccttgtctcatgttcggagtagaaaccatcaacaacttggaagaagagaacttctctaatatctctatcctctttgggcttggtcagtatgtgtggtttgatgagttgactgtttcatgtcgggtcccttgactaaatttcctttcagggtcctcatgcctgatatccggaaactccgagagacgatcaaacccagcaatactaacagaggcgatggtatgtgacagatgaaatctcatcaagctgctttttctgacattatacaagccatctcttctattgtcattgccatgcagatgatcattgagtacaccaagaaaaacaaatacaagcgcaagatcgttctggtgaccaatggtaccggtatgatgagtgatgacaatatcgaaggtatcatcgaaaaaatgaaagaagtcaacattgagttggtgatcatgtatgttcctcgtctatatgactccgcattatgctaataccatccagtggtgccgattttgatgacgctgagtatggtgtaaaggaagaagacaaggacagtcgaaaggtattaagccgtcttcaatgtattccaatattcatgttaatcaagttctcctcaggccgaaaacgagactcttctccgaagcctgactgaggactgcgaaggtgtttatggaacgctagaacaagctgtttcggaattggatattccgcgcatcaaagtgactaaaagcatgccatctttcaaaggcaacctcatgctcggcaatcccgaagagtatgacacagctatcactatacctgtggagcgatacttccgaacttatgtcgccaagccaatctcagcaagctcgttcgtgccacgctccagcaccgaacccggaagtcaagcaccggttgaaggcaagggtgaaggtgaaggtgacgctcttagctcagtgcgaacatcacggacatatcagatcacagacgaaaccgccccagggggtaagattgacgttgaacgcgatgacctcgccaaggggtacgagtacggacgtacagcagttcccatcgagcaaactgatgagaatgttgcaaatctacaaacatttgctggtatggggctgatcgggttcgttcagaaggatcaggtgtgtcttcatactaatcccatgtgttataccagctaatcccgtcaactagtatgaccgttacatgcacatgtccaacacgaatattatcattcctcaacgtgcaaatgacaatgcgtctcttgcgttgtcttctctcatccatgcactgtacgagttagagtcctatgcggttgcccgattggtgaccaaagaatccaaaccaccaatgcttgtattgcttgctccatctgttgaagcagactatgagtgcttgattgaagtacagcttccatttgcagaagacgtgcggtcatatcggttcccacctttggataagatcataactgtctctggcaaggtggtaactgaacaccgaaacctcccaagcgcagctttgaaagatgcgatgagtaatttcgtggacagcatggactttattaccactgatgatgatgggtaagtagagttcacttgattgtccagtcaactagctaatcaaaagagccagggaacccaccgacgatctcccaattgacgagtcattctcaccattactgcaccgtatcgaatcagccgtgcgataccgtgctgtccatccctacgatcctgtccttgatccctcagagcgactcacccaattcgcacacccctcggaagagatggccaagaactctaagtcccatctggagaaattgatgtctacggcagatgtcaagaaaggtgaaccctattcttaaaccccatacattcagaagagcccctactcaccaccgaatttcgttctatagttccaccaaagacaaaaggccgtaaacgccaacgcgaaacagagaaacccctctcaggtctggacgtcgacgccctcctcagtctcgaaccaaagcgaacgaaaatttccaccgagaatgcaatcccagagttcaagcaaacgctttcccgagcagaaaacatcgatgcaatccacgacgctgtgcagcaaatggctaagatcattgagacccagattacgcacagtctcggtcactcgaattacgaccgtgttatcgagggcctcggtactatgcgcgaagaactggtggactacgaggaaccagtggtgtataatgactttgtgcgccaattgaagggtaaggtgctgcgggaggagctgggtggggatcggagggagctgtggtggtttgtaaggaaggggaagctcgggcttattgggaaaagtgaggtggatagctcggctgtcgaggaagaagaggcccaagaggtgagctttgatttcttagtggggagtagaacgagtgctaacgctgcatatagtttttcgctaccaattgaacggtcgagtgggtgacaatctatggtctcgatcttggaacacatgaaatagtgcgtatgcgagagatatggaatactcatgatatttttatgccaaatttacccccatgtagatcttgttgcgtccgtgatgttatatagaacgcggttgaagcgaaacaaagttaagagtccacctcagatgactggattcgataatactgaccatctagatcgagggatacaaaattaaaagagtttagggagaaatgggaccactgatggagctcatgcaatattgccatatcgacgtagaattgacacatacaggagcgaaacccgcagacgaaaacatgtggcacgaaatgaatcggtacccaattgcaaggcatctgacgattcgacaacaaaaccaaacgccgcgcacaacatgcccaataataaccagtactcgctcgagaaaacaacaatagaccgagatttgcaaactccaacattaaaagcatccagatgcatcacggaaaaggggtatgcagaagtattgcccggatgggacgagaagaatggaagaagcgcctcgaggaaacttgcacagttccttggggcgaaagaagagagcaggacgtttagtggatggtcttgattgcccgtgcggggctgatggtattgctaccaatacggccactaggcttacgaacaccgcgagactcgctgcgggtgttttccgttgccctgcgagggctggagcgaatcttgctaaccgaaattggggcagcgccgctcttacgggtcacaggagtcttgggtacagagtggtcagcccagttttcctgatccttgtggttgtcttctgcgagggtgtagctggctgtgacggtagcagagtaactgatagaccgtgatgtgggtgaggcaacaggagatctagatgatcgctgggctaatcggcggagctgaatctcttcttcgctctcactgctctcgttgctcttcctgtgactgcgatggctgcgctgctcggtttcaacagcgagagatccggagacagttcgggaataaggatggtgacgcgagtcctttcggtgtgacttgcgaggctggccaggagttggtgcaggaagatcctggtccgggtaagttgcagcttcattgtgatcaatctctccaagggctgcgcgtttggagtgactattgtttggtggggtggagacaaccccgttactagtgcgcttcttagtcgacactcggggagtaacaggtatggactgtgctagcttctcgcgcatgctatcctcaaaccaccattcacggaaggcaccttggttgaggtggagccagtgctgctgaggtccaacgaccataccgggtcgcatgaatctcatgaaggcaattacttcattggcggtgaatccatacttgtagatcaggtaagcgccaatcaagcagcccgtacggcccaagcctgccttgcaatgaactgcgatacccttcttcttggtagttatcatctcatgagccatcttgataaaccgtctgacaagctgcaggggagggcacgtgccatcctcgaaaatcatgtcaatatgggcgattcccattgcggtgaaataagacgggcagtagagctctgagttgagtcgtacaacgagaccgacgttccgctggtggaaatgggccagaacattcttgaatggcatagaaagcttcgaggaagagatttccgagatggttgtgggcaatgcgttgtattcgggggtgctgacaggaatgggtgccacgggctcctgctgaggggatgcaaaggcaaggaaatccggcgtaacccagttgaagtcacccatgtcgactcgctcaaatttctcatacctattgaacaaaatcagtactcaatcttcggcagtataaccagtggcacttactcctcgagattgaagtcgcgaagtccgcaaagagactgctccttagccttccagactccataaacgacatcttgaatattcaaaataaaatctgcctggctgtatccagcatctcggaaaggcatgtaaggggggtctgcctgtgcgatgggtgctaaagccaaatgaggtggccaagattgaatcatgaccatatagcatgcaacaaggcaggccgcattggcgcgactccgggaatcagtcttgctatagaagactactgggcggtcgctgttggctgggtcgccaagaatctcatggaaaagcacggcaaatcggtagaggtgaccaatgtggagtgggccgaaatcagcgtgaaaggcattgtaaagaagggtgtcatcgatagtgaagtagacaggagagcggcgcttgcttggagtggcgggctgggcacgtgctcgcttgcttggggatttaggtgcgccctgatggaagggaaacggggttctggagctgggagcagaatcataagatgcaaggtataggcgatctaggtggtagtttttcttagctctctatactaggtaaaagacattcaaattgtccgaagaacgttgtaccaaccttggatgtactcgatcatctgcccgccgtgattgaagtcggtagtcatattgggggttgtttgttgacagccgcctagatctgcagtgattgtggaacgctggagcgaaggcgaatcaatatggtaccgttgcaggtcctgatgttgttttggggtgactcggaagatggcgaagccaatggtaagaaaatagtcgcggtaaaagtcagacctaaacgttcatgatcaaactgagggaaggagatctatgagcatagaatgttaaggataaagaggaaatgaaagcctggatgcaaaaagcctgtacaggtgaggggattggagaagaaggaaatcaacacaaagtccgagttcatgatgtttggggcagctgccatgccactgttatgttgtgccttacctgtttgggcctagttgcagccgttgacgtgacaacgccttggcctcaggcattcaattgtctgccttccgcattccaaaacatggcaaccacaacaaacaaacaatataaacaccacaaacttcacaaacgtcgcaaacaccacaaacatcaacatcaacatcactcattattagctcacatctcatacatctcatacatctcctctccagttcgtaccccgtcttcagctttgcctcctgattgcacattcccatggcaaattatatgtttggcgagtaattgattcatgtggataaacgagcccaagaacaaagcactcatgcgcccctctacttccatttaggtaacgagggccggtatatcatcctcgtgatggtcactgcggtatcaacctaaaacaaaccatcgcactgaaaggtgatgttcaagccgctgctctctaacactgcctgagattgagtgacctatctggtacagaatatgcagttagggcctccaagctgcattttcttaacacaacatctgctcaatacagcggcttcttgacgaaatttgcttcatgttgaatattctcgatggtgcctatcatgttcaatggttgtgacggtacaacactcgaccagtcatctccgatgatcctgggatcacaatctacctgaatgacgtctactgcattgctttgtttctgtaatagaagacagttgctgaatcaaaaaagaaacttcaaaaaacaacatagatggtcttcggtttccacttccacttccaacatggtgtgcctccacatgccatcaagtaccaagggcagggtggctgctacaatctcggcagaggctgtggctcatgcagattcaatgcaaggacatccctcggacgatgaactgtatttgtttcgaagccaaagtgttccattcacgattcagtacccctgggaatgcggtgatcgacacaaatttggggccccatataatgacccttgcctgagcctaccgtcaatcaatatacacccctcacttgaacttcgagagttccgggtgttgtggtattattcttactctgatggagcaatatttgacttgattccacaagttcgaatagaccatgctgaatctcccacgcaatattctctgtaactatgaggctgtgagatagtcaccccaaatatcctgcaaagaagaacaagcttctacagtttatcagcctgctttatccggcccaaccttgctgaaacttattcatctacaccactaaactaagacctgctactcatcctaactcgaggccatgtaggcacatacatcccttgtttcgcgcaatctccggtgaaatgaaactatctgcgcggctttctaaactgcagcccgttagcgccagtcgtgctaatcaagtaccttaatggacaataccaactacagtcaaaacatcggtcctaataaccccaaatgcgaggggctctcaacaatcgtgcggggcactgccaaaacaaacccagtgaattgtatataacccggcatttccatccaaatgtgtgtcaatttctatacacaagtcattcattcactttcagtcactcttcttctacctgtacacttcctacacaccaattcactcttttcacccgagactccacccacatcgaaacaatgaagttcactggattgaccgtttcaatcatcctttctagcctatgctactccaccgctcttcccgtccttggcaatgtcgagggtaccttttctagcatcgagggtgcggttggtggtgtcacaggctctgctcctaagattgctgcgcccattacctcagccactcacggcctacctggcactctcaagcgtgacgataccgctgccctcggtgggactgtcgagaccatcccaagcctggccaatagcgctgttactgtcgctggcagtgccgttggtaccggtgaaagccttgtctctggtgctgctggtactgccgagaatgcggttgccggctccgctacgaagcgccagctcaacgaccttgttggtagcactttaggaagcgctgttcctgccattatccaagaatccaaagccggtggcctggctcgtgccctcaagcgtgacgataccgccgcacttggcgagaccgtcgagaccatcccaagccttgccaatagcggtattgccatcgctggcagtgccgttggtaccggcgaaagccttgtctctggtgctgccggtaccgcagagaacactgttgggcatacttagtcaactcgatatgcctcatattatgtcgtttcttcccgcatgttggtcatttttcgggatttttcatgattattgatcgatgtttcgtgtacaaagcttcaaggtgtctttggcacttctataactctcaaatgtgttttcttctttgccttattttttccccagaacttaaaaccagtgaaatcgattgagtattaggattttctatgattttctttaggcgttattaggggataaaaataaaaaacaattgacgctttcttcaaaattttcgtttcgcaacagtttttgtctagccgtggtcacccaatacccgaatggggattgtcctgaaaactgacaatctagtcagcgtagttaactgccaagacatcaagaccctccattttccacctttctgtttccccaaaaatcttcagcgctactttacctgttcggaacataagagatgccttacactgacttccatcgaccgcattatgattcgaatccatccaccgtctttgttgactcagatggatcacaggtctatgaatcgccccaccaaggtctactttcccaaatcatctcacgaaacgattcggcagctctgaagtcgtataacgattgtcctcatacctatgtgttctggaaaaattacgaattcgatgaaagcaatccgttacacattgccatctacaacgacaatttcgatattctgcgtgagctcgtacagatctagtccttggatacaagcttgacacagcccttgcaagactacatcaaaagccatcatgtctctcctgttgtagaggcttgtgcaattggtaaccaagagatggtgctctggttgatgaaccataatccctcgtcagggacattggaagatcgggattcagaaggtcacacagcgcttttcagagcagccgagggcctgaaagaagtgggcactatgatgatgcaagcacaagatgaaggaaatgaagcgcttccaagaccaaatctcgatcagcgttgggcgcgtatataaccatttattggttggcttctgaacatgaactgccctatggagatggaagacgaaacgaatgaggaaaatgacaaacaactactaaaggacgaatgcgcctacactaatgttctacctggaactgtactcggtgaagctgtctcctacgcaagctacaatctagtctcacgtcttatttccaaaggagcagatcctcatgcattccagagatggcatggcggcaatagctttgctatagagaaagcggaaaaaacaacaccattacacattgctgcattgtatggaaatgccgaagccatcaaagctttgtttgagcatcgattacctggaaaaatacaaatagggtgtctatcgtcgatgatgagggacgaatcccgctacattgggccgtggcaggaactcacgtggatacaatcgactcttataagatcacgtcgcggatggtagctagtgtcaagttactccttgattccaacccggatacttttcacgctcgaaacaagcttggcgctacagtcttccattacgcagccaaaaacaacacaggtaatggggcaaatattgaggccataagcatacttctggaagctgctcgggattgttcagatatgctcaactcgcgaaataattctggggtcagttctcttggagagctaatcgattctcaccaactcattcccagtggtctgacacacatggaagggattaccaggcttctactgaaacacggagctgatgcgcggcgatgtgacgaggctggacgaaatattctgcaaaaattatgcagccttgcttggctggagccaatcagctcgacctttatagaccaattactccagcaacttggtgtcaacgagaaggatgactgtggctgtacagctcttcactatctcgtaaagaacttcgatcaagccgatgctatccgacactttttgagtcacggtacagatgtgaatgcagttgacaaggaagggagtacccccctgcacgaagtgatgaagggtacaatggttcggaaacgggatgaccctactagtcttgagcaacttcctatgcgcctcaagaatgcacaggataagatcattcaaatgctattgacttccgggcatctgaaggaattgtcaacggaaatggagaaacaccgagacaagtacagaagagggttttagaagaacgcgctcaccgattggcggcgcagaaagtcgcctgcggaaggggtcgaggaagagcagttcggtagataggatcgtgtttagtgcaataggctaccagtatgttctcattcacatcagtagtatcaaaattaaatgttccaacacccactttgatgcttgacctacaacgttaatcacaatctaggcgtactaatgtcatcgtttctatctgtgacaggaaccaagcattctttccgatcttccattacctacctcggaataggggtatgagtaatattccgcaatgtcctctggaatactctaggacatacaaacgtagaaatgaaagggttgacgctggaggtgtcatgctgtgtaaacctccatggctgtgcttgccaatcttactattcaattctgtcaagtctgtctctttttcttcttccctttcctcaatatcgcacccttggctttgacatgatgctttcacaatcttcattccctgacatgcctgtacaacccatcattatgaacacacctgattcaatgcaatccacgaccctcatatcactccctggaagaagaagcgaactcgacctgttcgcaaagccaagagttggatcgcggtacaaacgccaagaagtcaatcattctcgacgagttgggcgacgcattgattgaccaattctatatcgccagtctaggggatcgtttggagacacccaatgtatccgttgtcgagcatttgcgcaccagccttcatacagcaccgatttccgatgtcagctcagccagcagcagccacgccttgactgtcgtcgaaagccacgtcgaaattacacctgcaacaagtctagacgaggatgatacgtccctgggatcgcgctttccgcatcctctgccgtgatcgacctttctgaacaaaacggaacagccccccgccaacaagaacgatactgggtaaacgactgcattgggatagggctagcgtggtgcattttattaaggtaagctgctgacttggttaactagttaactagctgctctccaacttttgctcaggcaagcccttaaacttatgtaatactcaggcgcgtgatcagttttagttactcagtgagcaaaaagcggctaggggtaaacaggtcagcactaaagcggaaagggaaagccatgtcgcgcggcctcaaatccggtgtgtacaacatatgttttggatcgatgtcaggtccacctgcatgccttgatcacctacgcatatactagtagtacatagacacacaggtcactgagtcccgccatatatccgatcaaataaatatcacatatattgaatggctgctagtgacatcttaatgcatcttaataaaaatcttgactctccagggctagattgcatccatggattgattacagtcagcaatgatttggaataatgttatgtactgcataaatgtactgcttttgaaccaatcaggtgactcacgaacataaatcaggagacaacccaatcaacaatcggctcggacgacttcctattccgtcggctccttggataccccgtggccagcccagggccaattggtaagaaattgaaccaaccgaggtcaattcattatcaggagaatacaagaagaaagtcatgttcgcgtgttcgcaaatgtctactctatcacattctgccaagtctctccggtcaactttatcaacgacgtcatcccatttatccccgcggacactccagagacacttccctgttaccttccctattttccgtcaaatagcaaccatgtcgtctgctacatcgttcttcgactttgagcctcttgatagtacgtacaattcacgtggtgtaactgccaatattcttccctcatcataccccaaatataagctgcgaagaacctaatcgctaaccaaaccccgcatacgaacagaaaagggcgcaccctttcctctttcctccctgaatggcaaggtcgtgctagttgtcaacacagcctcgaaatgcggattcacgccccagtttgaaggcttggagaaactttaccaggacctgaaggcccagtaccccgatgacttcaccgtcctcggattcccgtgcaaccagttcggcagccaggatcccggctcggacgatgagatccagtctttctgtcagctcaactacggcgttaccttccccgtgcttggaaaactggacgtgaacggcgccaacgctgcacccgtgtggactttcctgaaggagcagcagcctgggatcatgggcatgaagcgcgtcaagtggaactttgagaagttccttgtctccgccgatggaaaggttgtgcaccgctgggcttcccttaccaagcccgagggacttcaagatacaattgttaaggagattgagaaggcaaaaaaggagggcactcttgcttcgttgaagaagagtgaggctggtgctgagcaggctaagctgtcgtaaggctgtgcttgaggtgttattttctgaattattgtggtgataccttcatctgtttcattgtatctatattctggtgcttctgcttgtgacatactccttttcggtttacgatttcggtctccgatggaaatcaaaccgagcagtaatagtaattcatatcccagtttcaaagctcttggacacctgttttgtaaaattcaccagatcagttcattggatctatatccaattctccttaacatgaggcccgacttggtggtatgcccgatggcccatgatgccctaaattaagcagaggaaccacccttgggaatcagatttcgtagcgacagatcgtagaccacatcctcgaccttcttgacctgtattgccacacaaattagaaatttaaacggcgaaatagacgctgtcatgttttgaacgtacgctgtacttgataccgtcgctgcgcttgcgcaagatatcgttcttcaagtttaggagctggaacccagcgaaaacttccttgacgaagatgccaatctgcatgggacgggtgtaatcacccagagtgactgagttgacagccaagcgagcctggaacaaattagctgtgaacagacagaaaagctctgagatttgggaaacgaaccagttcctcaaccatggcaatcagtgccagtaggtaatcctcaatcgtcaggtggaaggcatcctgctcctttaagttgacaggaactgatcaaagaaatgctagttagtattattgtaattaatgtatacatacagcacccgtggtgctcatcatagaaagagataaacaaaacgtactgtccaggaatttgcccacatcatcgatagtcatgaaagatgttgagctaggtcccttgtgctcttgcagtcctcccagccatgcgcaaagctcaatagaggcgacctgatagattggatcagcatcagtcttccgacattgaatttcagaacacaaaccaggttttgcagctcacgggtccatagcccgttgtacttgtagaagggatgttgatctgccacggccttcagacgagcaatctcttccttttgggcaaggatttccttagtgacatcgtcaagcacgggcttcactattgtagaagtcagcaagacggttcacgaagaatagaggattagtgtggaattctgcctatgggaaaagtgtgggaatttgaacgttgtacggtgaagaaaagagaagcagttgatccaaaggatgataccccaatcctctcatcagaccacagatagataatggatacttacactgatcagcgggcgtagaatgggcccgtgacaggatagcctgtgtggaacgccctgtagcattcaatatcagtcctcatgttcagcttcaatcccgtgggtgccgtccggacaggggcaggcatctggaaagtcacgcattgtagagcatacctcttctggcgagtgtgcggacaatctcatttagttcctatccaatattgttagctacctgtcggtgttcctagctcaagggtcttgttccggtgtaggcttggcgcgcgaagaattcaccgaagtcaggacgcgctttggtacttacatcccggacagtgctctcctcgtcgatcttcgcctggagattctcgaaaatgcgttgatcaatcattttgtcacttggttgtgattgtagatagatatttgaaaaagttgaaggaaggtgtggtgttagaagtgcgctacgtcaaaatccacgttgaaaaagaggatagcgtgcacaaaacaacgcaattatttgcttacatcgaaaatgatatgatgagatttgatattgcttttttaaatatattttactgtcggaggacacttcctccagagtaaagtgatctgaggcacttttcttttaccatgatttacgacgcagcctacagctaccacccacgaaacgataataaagctttggaggattttcagcttcttgttagagatttggatcccacaaagaatgaggcttgcctgtgacttgtgtctacccccgatcaaaacgattgcaaaagagactcctccgcagaaacaaaaaagaacgccagaaccatgaccatatttgcatattttattgttgccagatcaagtctagtgttcgtcgtaaatgtcgtaaggaagcgatacatacactggccggtgccagggtaatcacgcagcgatggaggcaatgcttagtatcggtatctggtcgaataatctgcgaaaagtcggttgttagtgaaaggtgtttctattctaggatggatattgaatgtacctttggggctgaccaccagaccacggcccttcttggcgcccttgtatatcgtctcgatgatgtcgatcaactcctgcttgtcctccagcacccagttcaacttgttgttatttcctgtgccgaaatcgcacatcatgtgcttgttgcggtaaaagaacatgatcgtcatccggtcataaagctcgtacatttggttgaagtccgagacttggtcaaggtcgcataggtaaatgacagcgaagtctggggtaggctggttagctgctgttcggtttactgttggggtatctcggtcactcactctttacccgctcggcgattttgtagaggagctcatcttggcggatacctgggagaatgggttagccagggacggtggcaatatacgtagatagcactcacagtcgggatcatgatctcgcccgaatcggatcaccaccaggcgttcttcctcagagagtatagcctggtccacatgccaggctgtttgcaggtgagggaggacaattgaacccataacgatggctggttttgtgtcgataagagttcgcgcgatgggagaaatgaaaggcttatcgattgggccccgcgatcgaagctgttgtgtcatgtgaccactttggctgttctggacaatgttgtataactggggtgttgcctagactgttctgtttatttctcagtgcgctatgttagaaatatcacggtgattattctaaggttaggctgtgtatgacctcatccaggcgcctcacctaggcatcttgggctaagtactacactgtaggacgcattctatgaactacaacatatatcacagctggagatatacaaggtaaccccttgtctagactgtttagtctgttgtgcagttggtgtagatgtgcatgggtctaatccaagcgcctcggtatccgattaggcaagtacagtgtaggacgccttctaccgatgacagctaacagttagcgtctattcaaccaagagaaaaacaagagcatcgcagtttgagatatttcaataccccagggtctactccgtagtaaccgatcaatctaaaagtcaaagaagctaatgatgcggaaggcagctggccgagaaagtctcctaggttgattctttttggttgtattttctgatactactttaggagacaaattttacaagacaagagcccaatctatgacttcttctccaagtgcccggactagccgagcagttgatgaaaaagagttcgcgtcgatcgggggtagtgtaagcccaatgacactgtgcaacgaggcatgcgcaagcacaggggccaagtcgcgggatccaaaaataggaataatcaaagtgtttcctggacggaaactttcagagattaaactgaaaagaacagatactacacttgatctaagccaataggcaaagagagctgaagaagaaagaaaagaagaggaacatctgggggcagggacaccttcttatacacaaatcgatgtgggtctaccaccagcgaaattaagcgatccaatcggggataatgatcccgagactccggggatgtacctgctcaggctaagcgatagttatgctgactcacccagctgactcattgatccttgccctaccctatatcccaattgagcctagcgcaacacacctctggccgtgaatttttgctaaccaacattggctccaccgcgaaatttaggaagttgtcttgaccactctctcgccggcgcaggatattcacctctttgcgacctttcccaattccccaaaattcatctccccccaatccattaacaatggctcccgctgctgtacgttgaagtccaaatcgctttgctgttccccccaccggagtctctgcgggctcgtcttcgacaacactgtgaaactcggtattgaaaaatctatcgagtctcccatgttgtcgcaaccgaatctgcgagactaccaccggggatcgacattatggagcagtaggctaatttgattccatgtggtataggctcgtggtcgcaaggcccagaaggttacccagaagttcgttatcaacgcttcccagcctgctagcgacaagatcttcgatgtctctgccttcgagaagttcctccacgaccgcatcaaggtcgagggccgcgtcggcaacctcggtgaaaacgtcgtgatctcccagattggcgagggcagaatcgaggttgttgcccacatccccttctccggccgctacctgaagtacctgtgagtttatctatttcccgggatgcctcccgataggttggaatataattttgctgaccatttccttttcttcaattcagcaccaagaagtacctcaagaagcagcagctccgtgactggctccgtgtcgtctccacctccaagggtgtctacgagctccgcttctacaacgtcgtcaacgacgaggctgaggatgatgaggaataagcgtgtcgctcctgtcatgtattgtttctttatcccgttcatcgatcggttctagtctgtgtgtcgcgcttggaacgtctgtatggattgaaagcgagagccatgggggggataagattggtctatgaggccacgaataaaactaaaaaagtttataccctcattctcttcctaacataacgcgcatgatcatgtagattgtccttgtggtatcttatacaagacagtaaaaaataaaaaaccaacaaaatacgtgaattgaggacgagaaagagaaatacatatccaagatcacctgctgggctttctcttctgaaccgttgtccatgaagatgtcaaggctgatccttggccatccggacagaccaacttgcccccctcgattttctgtcccttcttcttcagctctttccatttctcgcccaccttcactctcacgagatcgcccgtagcaactgaatcttcctttgagtcgtgcccattgtctccgacctgaatgtcgcggccaaggtgcctttgaacaagggccttgagacttatccgaatggggagacccttggggtgggggtacaagaggacggtgtcaatcaccgtagggtgaatgatacggcaagcgttgaggtcgttgtcgattgcatgaccgataagaggtgtctcgggctggaggagcttcagaagtagattgcgcgcctctgcgggtgactgaacaagttgcaagggtgggtggattttatttttctcgtctcctaaggatgaatgtatgttggacatcggagtaccatatggacttgcggaagcatagtgttgtggtgtgacaccggaaaagcgtgtgttgagatctaatacttcgcccataggccgaaccagcacatcaagaagatcatcgcctttaggccagctgactgcagtgagacgaatcagttcgagacctaatgtcgtgtagcccatctcgcaatcaatagagaccggctcaagtggtcctttttccggctgaggtggggttgtctgaaattggaggacggatgcaagtcgcttggtctccgagactttgaacacatgtgttttggctctggtacacccggtagacgttcccagtgcttcgctgcagcagggaaagtagggctgggagggaccggtgacatggtctgttttcttgcgctgagggtaaacaggccgtcctggatgatagtcacagtagccaccgctggccagggtaccatcttcacgacgacccggaaatacctgaaatcgttgaccgcatctatcacatttctcccagcccttggactcatcaacgcctctcttggcagtttctatatctgcatccgtgggctgctttgtgacatatccgtgttcttcaagaccagtgaggggtgtgactagctgggatacaactgcaatttcttctgcgggggtgaggcctgtgttgatgggtctgggaatcgctcgcggcttttgaacggggtttatcttatagtatcgcgcgttcagatgggacatcacctctttggcccattcgtcgatacccatctttgtaactctcacgattcgaagtttgacaacattgccgtaaacgcttggactgtccctcgcaaatttctcttcctcatcaagggccattgtgatgagttcgtcgggggttaggacaaaacatctattcgagctatgcttgtcttttcgtagcttctcattgagagcagtcatggcagagtgcaacttctggagaatggcagtccgactgccatgagttgccggtgcatgggcaagcatgcgaggattcaaagattcttttggggctttgcgagggggaagttcagatgaagatccagcagatgaggtattagtgcgcttcacaggctcgttccccaaaggctttggtgtgccatggtttgaggtaggctgggcggtttcttgagctcctggggtgtcttgtgtattttgattttgctcggaggcgactgatttcgatgaccgccgtcccatttcgagcgatgattctttcaagctgtgagatggaatgagggaccccagcaactgtgagttttccactttggcccgtttagaaggagggccatcgtcacctgacactgatatcttcgaacgccgagcctcggctggggttgggttattatcatgagagaatatgcatttcaaaagagtgcaatccctgcctcgcgggcattgaattgccccaaacaggccgagcggcgtgaacatgatgaatggtcaccagatgagaagataggttaagatgtagaaatccaggtctcgaatgcaagagctagtaggccgatcacaatttttagaagtacctaacgaatatgtatagctatcgctgcccagcgatccttttgtgtttgttttgtgcactgaatagaccgaaacgaatagctattgcaggtagttaatgggatcgcattattcggcacttgcttagccaaagtgcattatatcaaacatagcaaccgggagatttgaaggtattgagaggtcagattgatatcacttgaggacaacgttggagctgttcagcgaagtggtaagtcaaggatgcaaagaagacaaacactcacgtaatgcctgatatttcaggcagaaacgagtggcatccagttcatctttatttcctgttgactcaaggtttgtctcgatgctagagagtataattctcatttcaattgagcctaaaactcctgcaacaatgagcacacagatctatgttgtacttgaggacttcgccggccatcgaagtcccttatcgccgatagctccaggctgacacggatgcggccttcgggtgaatagacatccggttgttgaataccaggctccttttcttccttttgcccctggaatcagttccattctcaaagatggaatcaaggaatgaaacaatggcaggtacttccaaagccgaccatctctgtgtcttagttcacgggtacgctgtattctccttctcaatgacgtactgacgagccgctaacgcaaatctccccaatagactttggggaaacccttcgcaccttgattatatcgcatccgctctaagagacagatatggcggcgaaaacctctacatcctctgcccaaaaacaaatagcggcaactatacctacgacggaatcgagttgggcggagaacgaatagtgcacgaggtcgaggagactcttgaatctctagccaagaagggacaaaagatcacgaaaatcagtgtggttggatactcgcttggtggtctgctcgcgcgctatgcgatcggcctgctcaatgcacggggttggctggataagctggaacctatgaatttcacgacctttgccacaccacacgttggagtgagagctccactgaaaggatacaaggatcagattttcaatgttttagggccgaggacgatctcggcatctggccgccaaatgtggctggtcgattccttccgggataccgggcggccgcttctctctgttttggctgatcccgagagcatcttcataactggattgaagaagttccggcaccgcagtgtctatgcgaatatcgtcaatgatcgctcagttctcttctatacatctggtctctctaaagtggacccattccgggatctggaagacgtgaatatcaactacgtcaagggttatgaagatgtcattatcgatcctgacatgcatgtgcttccaccggtggaaagaaaccccgaaaccgcagcagcgcgattctggaagaagataaaatcgttgactctttgggtacctctgtcactcttgatcattgttctctcgcctctggcttgtacactcttcctggtaaatgccgggatccagacgtttcgcagttcaaagcgaattcgtatgcatgaaattggcgaaaacggcgagcgctttggaagatacagagtaccggttttggtccaagatgttcagcatgtcgtggagcaggcctttgataacgtcaatgctatacaagaacccgcttacctgtccaacagcgatactgaggtgtctgatgcggcgcctgagaagcccgctagatcgtctgtctcgaagtccgcgcaaagcgatgacactgagtctgcgtcggctagacgttcatcaacgacggaggtttcggtgcattgtcctcagcttgcattgactcccgaacaatttggcatcattgattccctcaacgccgtgggaattcggaaatatcccgtccacatacagaagcaccaccacagccacgcagctatcatcgtccgggttgagaaggatgggttccgagagggtaagattgtgatgaagcattggctagacaatgagttcgcgttgtaattttaattagacatatagccgccctcgagcgttagagcatgcatgtatttatagtctcgacatttcatcaactgattatcgaatattactttatataactatagaatcatcctagcaatattcaaaattatgctcaattcccgaagagacacccggccaattcccttttgccgacttattttacggataacaacaacccaagcaagctcgtcctcgcaatataagtaccaccacagggattgtgatcgagcccagctatactcgcaatcctggtactaccctcttcagcactatcccgtggtcaatatccgtagtgcggcatcagcaaggtacactgtccctattctggggacctaggttggcatattagtgatggtatatcgggttaaagctggaaagttagtacccttataggtagttacctactgctaccctcctggatatatgtacttacttttcagtgaggaattatgttttgtctgtttagttttcagatcattcatttggaaagtttctttatcattgatcgttctggaatccatttcaggcttccggtagtactatgtagggaaaacatctaacccatgttgtaatttatctgcaaaaagaaccgtgccatgaattgcgacacaatgcagaagttcaagagaacaaggaacaaggaatcatatcagaacaggtcggggaaaaaacggaggaacggactcgattgagaccacgaaaccggttgtcgagaaaacgcagtcatgagtgaaagaagatcacatcataccgacttatttgggaagtgcttcgctgatgtcatagtcgagctcggaaacagttattcctttggaagtctttcgatgctcgcgctcgatagcaaacttgacggcatcaaaaacattatcgcatatctttctgggtggatagcgtgggacagcaccatcctggtagactccagtcttaaccagaatggagaaccagtcattttccgtagtctcgttaaattcatttgtgccacggatgtcggattccggagtatcgccaatgaagtacacggtagacggagacttgtcgatgccacacgagtcctttcgccacttttgcaaaagccgggtggcaaatccataggttccgagctgcggcttaccgaaagcagtagtgttgaggtctttgcctgtgatagccgcgtaaacagcctcgagggaagcgcgcagcgctcccatcccaagacgtgaatgttcatgcgatgttgaccaaaccacatcggtgtgcgagaagaagacaggtgggccttcagtgaagatctccgaccgtttattcaaccagccgtctttgctcatgaggcagtccaaaatgatttgctggtcaccagcccagtcgcgactatctgcaaagacgaagatcgcttcgatgcggaccttgtctaaatcgagcagccgggaattttggtgctcctcatccgtcagcgttcggaatggcgtagtatcgtgtctcgtcttaatgatatctccgggtgtgatgacatccttgaatccgtatccctcagccacgacccggcatttttcaccctcgccaccaaccaccaggacggtgttgtatcgctctgccatttcgcgcatgggcgtgtggccacagataaactggccagggtcgacttccaggtcgagttgtttgctgaggtccagacatcgctctttctctgtcttcccgccgccgttggtcaagaaaatataaggactataatgttgccgttagattcaaattccttttccgtcttttctttttttgctcgcaactgtttcccctcgccctgtcctgggtgaggaaccatggaaataacaccagggcaaatacttacactttgactccgtaggggttttcgccgttgatatacttcatagcatcaacggcttcgggaataggctcgccgcccttgatcagaacgccatcgatatcgaaggctagggcgaaatcatcgctagtaaccttaggagggttcgtcataggggtgttgattggagattcctcagatgatacttgatcctgcttggccatatttgagttgaagatattgtcaggagtgaaaatcatcgaatgcttaaagacgacgttaggcccatggagatcggtcaccctttgagttcctgatctatctgtggccatggaagatgaagggtgtggggcggcgggtacaatgacgctggcgctgccttgtgatgaagcgttataattacttcgcgtcaaatctcttacaaatgggtgccagctattgagctagctattccgatatgtgcgctgggtatgcgcttgaggtgtaggttgcaggatacaagcagatagagttgtatgttactgtatagagtagtggggggggaggccaagggtcattaatatagcccaaggccctaaagaaagaggttttacatcatcgacccttttaccccaaaaaaatggggcgttcaggttcagaccttgttctgcaggtttttctgggctaaaacaaaaccggaaaaaaagtgactatcgatccaaaacggcaggctacgagtcgggtcgatgacgctgatttggtaagaaaagaagcgcaacttcggatttaccaagtgcgcgggttgagggcagtggaggattgacaggtgtcgcaaatcaggaccaatcacgagggtaggatttgacaagatcagcccgcttcaagcctttttgcttgctttacacctggtcgctgctgcatatccttaggaagcgcctcttgcattcttcggatgtatcgcgtattttgaatttgacacaaaggccccgcggctgcacccacaggacatatcaggccattgacgtcatgaaactgggtcccaggaacggaaataaaaaccagcaaattaacacccatggatctacgacttataccgtatgaagttcttagtgaggagtagggcctagactgggtatgttggcgccgccacatgctggccgatactactgtacctcggaccaacatttagcatttgggctaaggaatgcaagccatagccaaaggtcacggtttggataaagatgaaatgtatttctgaacgcacataaaatataggaataagttggcgccaagagcagtccgagtcttactattttgaatgttcggcgcaatgaacactttgatgccctaaactcggtctaatgaactcgtgatatgcgggatacctgccagactgagtcagagcgccaatacatgcatatctgagctaataatgagaaaggaaaccatgggttgtattgtgtctgtcactaagagagagagaagaaggaagatcaaacaaggtggggagcaagtcctattaacctaaaagcagaaacagtctcaacaactaattatagcaccatacggactgcaagctttcgagtctcttcagctgatggaggattcagccgtggtcaagggatgtagggtgcaaccgggagtattctatggcgccatatgcggctgtcaacaacagctccgagtaggtagtctgtgcggttaaggagaggaagggtcacgatcacctatacaagcaagtgttgttgggttaagatgagtccggacctaggttagaagaatgttacgctggaatttaatatggatatttccgtgaggcatatcacaatcgaatcatgagatgcatcggaccggtagttatattatgtaaagtcctcaagccgagatgtcagatccagactcctccgcaaggtcatccataatagcgtcaaggtccatttcatgatcaatatcggcccagtcgtcaaagaatacatcttcctctccatattcgttctcctcccacggaagtgccagtggtttgctcggatggtagaacatgcgatggtagaagggcagacattcgcaagaacacacgtcgtatttgggcatatcaagaggataaggaacggagaccattgacatctccacgtttagttccgcgaacttgcttttccaggtgttgccctcctgacatatctcggtgacgggggggttgaatttggattcattgattgatgggagatgctctatgatttccggtacctcgcaggtaaagcgacgcagctttggaagttttccgtccttcaccatctcgtaaataaccgacgggagccaggccttcacttcatcgtatcttatcgtaagactttcgaggtttggcggtagaatatcatctaatggatccagttctatgcattccctccctgcaagtgtggcgagggttgttgtgagatgcttgaggtggactagttcaccgaagtctgtctcctcatcacctccccagtaaagatcgtaatctatgtattccagggaactgtcgtgtatgagggccgattgaatgtaacaatacggttctccgtcggggtctatcaattcatgtgatctaggtcctctgaaagtaaatcgcttcaaggctgttaggtattccagtgctgtttggaggtcaaatggatttataacgcagttcagaagagtcagttcctctaggggcgatgtagatgatgctggaggtgcaaggtcggcttgggacaatcggaaagtagcgccagtgatacagagctttcgtaaacctggatgacagaaaagtgcttcattgaaaatcggtaaacatctgccgttcatcttaggattgtgctcattatgatcatagtcgcttccgatgtgacctggtaacattagattttttttattcagtagagatagtcaattacaagactcacaaacacgcaaagcgggcagccccgatggggtttgaagagaagcgtgccagaacaaggtttcagccgctcgctcgtaagtaatctcgtgatctggaggactgaacgacgattcttctgaaggcccataccccaactctcgatactctttcacgcttcctgatccagaggcaatctttttcacccattgtaacagcgcgtcatctctggcatgggtactggcccaccgagtagaatcaaagggcctgggattccttctcaaactcaagttctctagattcggcaaagtcacagccatcttgtagaacttgagatgacggtaggaccagacttctgacccagcatcctgcttgtgtcgaatctgacgaatgagtggtgctaactctggacgcttctctatcgtgagagcaagacgagcaccactttcagaattgaacaggcgtacgcatttgtagagctgagggtcaattctggaataaagtgcggggcatgtttgagcaagtcggctcagatgttgggcggattcttcatcttgtaggtattcaatgatgatatcccacagctccagaggaaagacgggtagtaatgtagatctctgggcgaacgttcgttccgttggagtggccattgaggatgaatcaataggactaatgatatattgaattccgtacacacttcggaagatgatgagaaagatgtggagtccacgggtgatgggttttctactcttttttggcgggacccagcttcttatctaagccccgccttctgacctgtacgcttgacgcgttttcgcgtttcctgtcctgttttcttgaaaacagatctgaagatatacaagattagaaatataaaaaggaagctattaatacgaggaagccaagccgatattcaatgctattcttatgcgatacaaacgaaattcaaaaaattcaaaaattcaaagctctccccccttataaaagaacatagtaatatacaacaaatgcaaactctcatgatggcataaattccgggtgacatagccccatcaaagaaaataaatctattcatcaacgcgaagaatcaaatcatcgcccctcctcgacggcgtcaaattccgactgttcggagaaacccgtttcgacacagcgccggccttccttttcggactatcaggataatgcacatctccaggatgcatatctgaaggatacggcagttctccagacggttctcgggacttcggcggcgcgaggccgcgtccacgctccagccataagtcatctgggcagtatggcgcgacgacttcgctgggtggtcgtggactgttgcggatctggacgcgtttgatatcgtttccacgtacgatccgcggcctggatactatctctgagcctggagggagggttgatgatgatagggtggggcaggattgaggcgcccgtcgtcctggtgacaagctgcgattctggggttgagcttgcgtggtcttgacgggagcggcagggagaatgtttgggtttgagcaagagtatgaggtttgtgaaacttgatagggtgtagcgctactgtctgttgacgaggttttgtaagctgggttggcgttggaagggattgctaaagctttcggggacccggatcttcgtttgaaattgtctgttgagaatccctctttgaatgcacgcggattggctggcagtcctgcgagttttggttggatacctggcctagggggcttgttttgcgtcatttctgctgtcgctgccgccgctgcttgttgactttcgtcctcttcaaatagagtctccccactaggtggccgatgactccacttcagcggcttcgggtatagtccagctataggatctgggagtagtcttgctatgctgtgctgtgacgattgtgtccgaggcgaagtttcccagtccgagtcagagctgatggcaaaccctattcgttcttggtctgtgggctctttgctctggcccaagtggtgtaccttggcatattgcggtgagtatcgtggtggttgaacgcttgccattgaatggaaagtacgtggccgctgttccattgtctcgcggtcactcgttgggctgtatgaagactctaaacccaagccgttcgttgggagccgtggcatgggttttgaaaagtctggaggctcagacatggcgcctccgatctcgaaaatgtgtggtgctgtctgttcccgctgttttcgtcgccatctcttgcagcagaaaaatacagcaacaccgatgatgaaaaaccctgccacgcctgatgctactgacattccaatgatcgccgctggagtgatactatggtcacctttcttattcgtatcttcagaagagtcactggaaatttgtccggtagaggatgttggttcaacttgagaccctgaagatgaagaagcagcatagaatgtgatttcagacgtttgactagtagttgacgtcggtgtcgatgttgatgttgctatagatgtgcccatagaggcctcagaggtgtgttcagttgtcgaagtagaaagagttggtgttgtctctctactagtttttgcatcactcgtcttcgtcgtacttgtgtcagaaaataccgtcgcggtaatcgtctggtgtgttttcggaagagcttcagataccgagtcgcatatgtgataagcctttgactttgcgatgactgtctgtgagcatacagacagaacacagctcaaagccgcttcccccaatgtcaagctactggttgtcttggtacgacacagacacttgatattagacggtgacgtgcattcaatgaaggtgtattcggacatgatgaagctatcgacgcaatccttcgcacagtccgggaccatgtcatatagagctgagtttgctgcatcgctggaggcattttcggcggcagagcagagtgtggataagaggaggatcgcgatgagtatcctgtggataggaaggaggagcatgctgtggtagccctatacatgtttatcatgagcgacgatctgtcatgtacatttctcccatcaactgaccttggaaattcctacatgggaacgattacccgtgaaagcttgtacatgcggttaccatagttggtagatgtgtctgcgaattgagtagcatatgtgaaggtagtgaaattccagaaagagggactccaatctagttaaacaccaagtcagagcgcgacatcatcagaggcgcgaggcaaaactttccatgacgcccatcgactgttgcgtccaagtatctgcatttcgacatcattctgaaacacagtgcttgaggctgtgtatgtataggcgctagagtgaaaccgcataagattcgagatggtaagacccgcccacccacatccccacttcaggagacgaatcgttgtaatggtatagcgccctatcaggatggtgggcctagtaggcgtctccgatacgcgccgggccatcgaaagcgcttagactgcagaacgaggggtggatggcgccggactcggtttcagatttctcaaacttggtggacgagtaactggattgttgttttgggcaatccaaccctgtaacgctgtacagggtcagagtacatacagcgttacggcgttgtggttagtttcgcttgagttgtaggccctcgccggacaatatgttatctgaggatttctggaacagattcggaagctcgcggtgacccgagccctttttcctgtcgggttacacgtggctgagattcacaaggctcattatgttaggatcatattttgtttggtctgcctttttaccagttacgatggattactccgtatattgcatgtccgtacttaaccgcctaatctacaggcgctccctacacacagagaactcaggaggtttatagtaaaagcccattcccatgaataatgaaaactagccaacgggcattgatacgaaataacgcaaagtcagaccgtatgagctggtatcattcataacgaaaaagcaaaaaaaaaaacccgcagtatggagcaagacaaaagaaaagaagcaaaataaaagcataaccatgcgaccacacaaaatattagggaattatgaacatcatgccggactcgcgtcggacccgatgccaagtggtggaggctgcattaggctagtctcaaccggacctccacggaatcacgctgacaccgacgcccagaatatcgaatcgcaccgacccctactctcaaagcgcaaggcaaaagcaagggcttatgtgaaattgatcgcagtgcattcgcgttttcaagggacattaatcttggagagcgttggttgcgaggttgtgtgggaggtgggtatctctagtatttgaagataatgtagctataatatggtcagcggctgtcacaagatgctggcgcctcaaataaacacatacatggcgtggatgacaccggggatccatcccagaatggtcaataggatgttgatcaggaaatcagcaccacatccgcgctccaggaagacacccagaggaggcaggataatggcaaagatgatcttgcaaatgtcactattggcagtattagtatactgagcataatcctactcacaggcgacagtgcgacctgaacagcgcgacctgggagggctgggagtgagggtaacaggagtgacagggtgacagggtgacagggtgacagggtgaaggctaggacttgagtagaagccacagcccatgacatagagaatggacaacttacgaagcggtgaaaggcattttgggcagatttgatggaggttttgaaatgttaacgggagaaatgggaagggaagtggagggagggaagtcttaaaaggggaggacaaggctgagagcttgggtcaattacatcatgggccgccaccttggtgtggctcgtagaagagaaaaaaaccaccaaaaccaaggaaaaacagactgcaaatgtggcttaggctatgccctgatttggcttttgacttttcttgacattttaattttaacttgtttatcactacttcgtactctgtgcgacctacggagtacaattattacattgtccagggttgccaagatactgatcatctgtgctggcggctgtcaatgtcattccccctaatgttcctcacctatcccgttcattcttttgctcgctgcctaaaagaaacttggcactagggattcacctgcacttcaatttcgaatttgtcgatcgtctgtgttctaagatttgactgtatatgttgtacagtacggggttccttgttacctgcatgtacggagtacatccaacatatgcgcccatgctgcagtttaagtttcataatggtgacgatctctacaaacaccgtcatttctaattttggcgtgaatctttacttggttaggcctgccaagtacttgccggactttgtacggtttgtagtgccaagtccccctagatcgtggttagacaggccagacagctcagccctatgatgggcccttgcccccccacctgccagggcacctggtttatgtggttggcgtttatgacatcctcgaaattaaaaagtggctggggagcattgtcagtgacacagcaacaagataagcattgaggcagtgaagggaccatgggtcacgcgtgataccgagttctaaagaggaaattaccagactgatcaaagtcgggtttacatatcgtttttcagccaacatcaactgcgtctaacaaggagttccattgcggtatgtatgtagatctggcgcaacagcaacaaactccgaccaaagctgttaactagtatgtaccagcctccttacccaatgtcagtggtcaagtccccattggcagcgagtctactccgtagtgtttcgcgagtagctacgtggttctttacttctgcaagagacccgccctgcggaccggggccccctgcggacttagatgttcagggccactgcttttgtggtgtccacagcagcatctgcatgttcttctgaaccccgtggattagtggtctagattccacttcttgctccacacgacaaggacagtcgattctactggtgcattattataaccaaacagcgcatgaatacggagtacatactccgtaactgcctcttcaatattcgcaatttacctaaagcttggaagcatacggagtaattataaggtgaataggggctactgtgtgcttttgggtagtcttttatcgatatcattctggttattccgctatcccttttatagctagaaatatgaaaatttgggtaaaatgaagaaaatatccagatgactctgcaacatatagagtacccagggaatatatatcgatggacggcggaggctcttacttgaatgaggctagcgtgccatattgagttgttcactcacaaccttcgcgctgtatcacaaccttgaacaactcaatctaaagctggtgtcaagtatgttgcgtgatagtatcgtacattgtgcatgatctctcctgagtacggtgaaaacagatgttccgctccgcgactgacccactatcctccgcaatgacttccgcattttcctgattggatcagctttaatcttgatatctcaatgtcaatgagattcaaacagatgagggtagccttcacttccggacgctggcagcttctgggatcatgcaaagcccctaaaagcctcggtcgcgcaaatagatggtatgcgacacagaatttggccaaaggtggccggccctttgcgtacacatggctcacaaagacagcagaacagacagtgagcaaaaccaacccccttacacctttggaatccaagctaaatagtccaagaccccagatgatattttatccagtcttccttcagggcctgtgagcccatcagccgcgcccgcttctgtccctctcctcctcgtcaccccaagcttcgcccactggcttgattcttctagtcctttcttgtcgcaatttctcggtcgcctttacggcaactccccagggaacgatactctctatgccgttacagccgtggttgacgcaatcccgaatactacatccgaaagccgcaatttaagtgagtctgaagggctgtcgcttctgatagtagggcaatcaggcgtccaggcaaaggctgcaccaccccgtctcatcagaagctctgccagcgaggaaaccaatctcttgttttcattccaaaccgatgtgattggtcaaaccagcaagggacctgcgcatgagattgggttgcgcctagcgaacactatatttgtcaatgggagggaaaccacaatttttggtacacgttggctttgggataaaacctcaaacagatatgctttggacaattcggtcgatttcacaagctgcatgcttacagccacttcccaggctgtagattctgcattggagttgccactgtacccagtgactggacggcgaagagtcatgactagcatgggaaacattttacggcaactagcaaaatcgatggatctgacatcgacggacacaattcctgcttcgtccgagctcgagaaggagcttccgcgttatatcgcagaacataatatcgttgaccagcgtgtatccgtatgggcacttgtcgagaaacctgactcggaggtggctggttcaggcttatctacccatgatcgcttgatccaatctcttcaccgaggtgggaaattgcaccgtgtcatgagcggtggaggtggatggggaaagaagcagggccttctttcgctagatcccgaagtcagcttctctgggactgccaaccgagacgatcttgtcgcattgactcaagttttggatcctgatatcgcacagttggacacacttccttctattgataaggggattactgtagatgatctatctctactttcacaggttgctactgcaggtgattatattcagttctttgtgtcagtagaaccaactgggtcgcagatcaaagttccgagcaatcatgacttgcaggaagagcctatcagctatcactttggaatggtagctgactccatgaaacttgaaacacaccaaacggatgaggaaaacaatgggatcatttctttgcctcacacctttggcgcattgtccgagaaggcaatcgcctactcgcagcccatcaagggagaaacacggtcggagtcgtgcacgaagctggatattccaggatctcgagttgtcctcgagactgtataaacagcatgatacatgtacaataatgcatacataaccaactgaaaaaacctaccccagctgaatctagtcatacatgtcacatatgctgtagtcattacctgtccggtggatatgccaagacagtacacgtgacccagagaggccagcatgtttgccgtcgacctccaagcctctggactctttccatcctctccgaccgcatccaactgagctcgccgacctcgggtgtttttatttctttttaaaggtctaactatcccacgaaacctcgttgagtcgtctttgatcaaaatggcaactgaactttggtaagtcgtcagctagacctccctccagcccctgggtgctcaacagcttccgatcaacaccctgttatcaagcccgtcatcccccataatttatggatcagccttgctaacatttagattgacagccccgtctatgcggtgagtcttgttaaatgctagatctcgacacccgagcacaaccaagccaatcgcccgtgtctcggccctccgcgtcatccatctgctcacaatgcatccgaatgataactaatctttcttcctttagcccttttttggcgcgctgggctgcacctccgctatcgtcttcacctgcttcggtgccgcatatggaactgctaaggctggtgtcggagtttgctccatggccgtcctccgccccgacctgatcgtcaagagtacgtggatctcaacaagagctctgccgatctggcaatgagatactcctagtctcgcgcaaggatatatggcagcaattcgctaactattctccagacattgtccccattgtcatggcgggtatcattggtatctacggtcttgtcgtatcggtcctggtcgccaacgacttgacccagcagcttcctctctacactggtttcatccagctcggtgctggtctgtctgtcggtctggctggtcttgctgcggggtaagtttcctacacagcgaatcgcctattgttctaagtttgttgctaattgggattacagtttcgctattggtattgttggtgacgcgggtgttcgtggaacggctcaacagcctagactgtatgtcggaatgattctgattctcattttcgctgaagtcttgggtaagtcgtagctattcctcatacctctgtataattgcatctaaccatccctcacaggtctgtacgggttgattgttgctcttctcatgaactcgcgctcgaaagcaacctgctaaacgaaagacctcccgcagcattccgggaatgtaacgtcgaatcgcctcatggtccgcgcgcgattcctggttcattcccggatgtgcattctcaacatttccccgacgcaaaccaatgtgccctcttcggtcggggaagctgacatgataaacttggtgcgggggcaggatcggatgatatcggaaaatgttaacgatttcagcccatttgaaagtgaagattcggtgattgagtggatgtagaaccgggaaatctgttcaagaattcgtctgggactcggtggacaggtgtgggtagatattggattttttttggctttacgttgcatgacaccgcgctggactttgtactttatatgaaattcgctgatcggggacttacgtctccgtcctctcttccattatggtggtttggcaggatcttctgtaaggaatttcttgtttctttcttgtcctctgccctccctgtcgacatatgtttcttctatctcagggttgcttaattcttttgagtgatttgggcttggtagtagtagtgtgcattcagcccttacctaggtacggtgttgtgactcatagaccttggatgtaactacgtatagatcttcttaggcgtcggaatattgtgagtgagtttgtaagatatcatatttactgagataaaacaataccaaatcagccaaagtagtagcgccataacagaagccgagtaattaagatctatttgcttatccgaatgcatgggagagtcaatgcccacatcacacagcagccaaagaccgcaatcacttctgcgcaagttcagcagttcgcagctaaaacaccaagagagaagaagtatttgtgtatttgtggatatttgatcgagtatagggcgagagagaatagataagggagaatggaaaaggaataaaaaaaaatgtatgaaagcgaggatatatgccctgaactctcacaagacttgcctcgacccaaaatgcacagacgcaggcaagatgcaactgatagcaaaaagaacaaaagtaaaccaggaaacttcaagcacaagtctacttgtcgagtttccgtcttagagtacgcgttctcttcatcagcttcttgaacttgtgcttcttcatcttagccttgcgccgtctcatggtgctgatagcatgcatggtgcggttgttgcgcagccgttccatatatgtcatacccgcagcggaatcagagggagcctcgatagagatctcgtcgcgcatatcagatgggtcttccatctctccgctgcgaacgaaaggtcccgtgtgtgcctcataggtcttgcggccgtcggcatgacgagcctcgcgaatagtcaggacggtcgagtaggtttgatactcattgtcgacctgggcatcgatggtctcggcagtctcggcaatctcggcagcggatgtgttcatggcgacgggcgggggaggaggctggaatgggcggagacgacgggtgaattcctccacagacatctttgagtcggggccatcaagcatgcggagttcgccgtcctgttcgctgaagctccgaaactggtcttcagactctgacatgccttgagaaccagtttccatcgactgcacggccgatgaaagagtgaagatgacgtcttccggttcattcttcagcggacgctttgacgagaagatcgcttcgaaggcatcggtgctcgaggtggggggcacagtggtcgtcaccgagattggccggtggatggagaagaacgacgctatatgaacatctagcagcgaacaaaaagaaaagtcagcttctagtcatctatttgcgagacaaaaccatacacggggcttgctggggtttgagtactaaccatgtggctgtcggtgctgtgtcgatggaacacttgggaggttggaaaatgccgtatgttgactagactttgaagatccgtttcgggtagagctgtccttcccccgacggcggttagccttgctcttctcgctagatgagttgactccttttgccggggcagaggtgtccattcgtcgggagccatcgctgggcgggacgggcggtttggaggatgaggaggaataccggcgttggtgcagaggtcgggttgcgccgagcaagctgctggtaagattttgaccggagcgagttataccggaaagcggcatgggagtccatgcnnnnnnnnnnnnnnnnnnnnnnnnnnnnnnnnnnnnnnnnnnnnnnnnnnnnnnnnnnnnnnnnnnnnnnnnnnnnnnnnnnnnnnnnnnnnnnnnnnnnnnnnnnnnnnnnnnnnnnnnnnnnnnnnnnnnnnnnnnnnnnnnnnnnnnnnnnnnaagggggcggggcccccccgcccgcccggcgtaaggatgttgacaacatggttggtagataacccagtcactactgagagggtgaatgagtctgaatcggaggcgaaatcagtcggcccggaactcggggtcactgatcatgcggatgtttatgtaatattgatgcctaaggcgtgacaagttatagaccacgcaattgtggttccacttgatgggggaaaaccccttcttttatacatattgaccgtattgtttcttcgggctatttcaaacggccggatgatttgatagctaaacttaatctctcaaggtacatcaaggctagagtccgaaaagtgaaaaaagtgcccataaaagagcaggatgtcgagttcattcagagataagatatagtaaataaagacccagaatgattgtgataatacagagcagtcgttagtaaacacagctgcaaagacaaacaaatggtatcactatgcattaaaccaaaaaatggaggaaaatggggatggcaacgacacagtcgctaaccgaaacgtgggcattagttggcgaaatcggataggcttttggatgcaacgtgatagacccaatgatgtgagcagagagcagataacaacctctcggtacgcctcgttaaaaaataaatcaagaatgaaaaaaaaaaaagaaaatacggcaatgatcacgaaggagtgaacgaattgtagccgccctggaatgcaaccggaaaataactggtaggctgaagagcttgagaaataggaaatgaagtccaagaaaaaaaaaagaaagagaaaaatcattgtcagacagggtcatggggaatgcctcgggaatttgagggcctctgccttatagtattaaggtatgcagattcttctgaatgatcatgtcctgtactgaatccatagtcgccttgagtaatgttgtatcagttgcgttagtgtaatggatgtagatttcgcggtctgggatgcggttgataccgcggaatcggtctgcaaagtactgtgccgaggaatcatagtcggtgtccgagccggtataatctgggaagtgtttggagatagaggagatggtgagctttcctttgaagagatcaatcttgttgaggaacagaatgattggtttgcgcttgaaccattcgccgttgactaatgattcgaataacatcatggcctcgtgcatttgattctgtaagatgtgattagcggtgctggcgagagaattgggaaaatcatgcttacagcattctggtcttcgactagacattggtcatatccagataaggcgaccatgaacaatagacactggacaccctcgaagcaatgaatccatttcttccgctctgaccgctgtcctccaacatccatcatgcggaagttcatctgcccgagctcaaacaaagtttccgtaatacctgtcgtccgaagtcgagcctgcaacatgtcctgattatcaggaagccagcccggagcgaatatgcgatcgagagatccatagaaactgaatttcatcagtccaagcccatgtaatatatcaccaactcaacttactagtgcaagttgtcatggagagcaaattcatgccctcgtgcaacagcgttctgcacaccttcatccttccacatggccctcatcgcatcgcgaacctcgagattagagaaggcttcgttggatcctacatctgggtccgtattgtctaataggtcggcaaatggctttcaaccctcgttagctgatgtcgggctcttgagaaaaaggctggttagtaccttggtcttttcctcgttctcaaaatcaatatcctcggcattcatgatatccaacaagaccttgaacgcaatgacgatgttcgagtagattacggcacgggtttgatgacgctcttcctcggggaagccccggctgtgaatgattcgcatctgcttgattatggtggacttgccggactctcccgctcctgaatattctattagtaactcgatcctgaagcaatccgacaatcagcgaccgagaatcacccacctaatagcagaatcttgatggtccggtccagcgtcttcttgtcattcttgatggtccggtcaatgcgcgcattgcgctggaaagcatccttatcaacctcctcgggctttgaaaccaagcaacccatggtttatgtccggtaacggcaaactacctagcgcgatggtggttagcaacggtttattacaagctgaactagtttgacaaggcactcgacggatcaacgcgttttcaatccgagtcagggatgcgattggattgcgccacacgggagtccggtcgaagctcagagacaaaagactcgactagactccaccagactcgacaggtgactagactctctccgcgcaaggtgatagatgtgcataccttgaaaaagaacaaaatcctcctctctattatgcctaagtccaactccgacccaacgtcgaatgactggcgtgcaacgtgataggcagaagcttgaaaggttcgatgggtgcttccgttattccccacacgtatcgaccacgttccgttgcgaattgagcggtcgtgttttcaattggactaggttatcctccgagacaggcgccaaacgtgagcgacacaacgtcagcctgccgaaggccgaataggaagcttgaaggggaaggacgttggcggtgacgggggggggagccgagatcgcgttccaaagttcaaaatatggacatttcccgagttctgaggacaaaaggacgtttcggaggctgagagccgagttctccggaggggagagggggcgagaaatggaagaaatggaatggcgcattcaggtcgtacgtctctcccgtcccacgagcgagtccacaagcggggaggaggtgatcacctgtcagatattctggtattttgtatactgatttcggtatctttgacttgagcttttgtcaatgttcggtatttggagtatttggagtattctcaggtattttcgcgtgttcttcaggaaaatacgtatgtcctcgttatcatttccgttaatttcttttcccttgacgatctcctctttgtattggaaatactacaaaggctttacttttacggactccatccaaatcttcactcccagggggccgctaaaccgatccactatggggtgggcgcttgaccccctgtctgcagcatctacgagttgcggacctatcaattgtaaacagatactgcagctcggttgttctattgttcgattgccttttaccgacactatatcttttacagtctgacaggagacatagagggatgaggaaaacttagggatccatcaaatggaactattggaaccgcttcgggtactccgtccacacccacacgttgatccaatcagcagaaattctgtgacaatcgaattgtttttcaattttccttattttgtcttacttttgcaaatctccttccttaaagaaaagaagaaatcggcatggaaatatgtacaacacccgatgtacgcaatatcaaaggaataatgtacgaagtacagagtactccgtacgaaatggtgcattcgccaagccaattcggaatgcaaagctccagcgatcgacacgaagctgctgaaacccgcatggatgtgccactggccaatgcaagggccatcctgaaacgttggcggattcctgtcccgggtttaacactaagggtatgcttggatcactatgggcatttgctcttcttcttctttacttccaaccgagatgttgagttcgtctactggagcctatgaaattcggattccccaagagaaccgtatgaatacatctacgaccacagttctaccgaggttctgacggaaataaggctagcaccggagtacagcgcttaaggggttccgcacaaaccaatcagagagtagagttcaaacccaacattcgacattctgaagggctccatcaagagaaacagatgttcggtacgaagtattccgtgggtggaccgtgactatcgtttctcttcgcccccaagcacacaatttctgccgtgcttgagccgcagatgttgtatagagtatcttgaatttgactgtgacgaggattgcgagatgaccaactgtgctcaacgattcatttctgcatatatgcaaccccgcaatactcagtactccaggcccgtcaagaggggggacaaagactgattgccccgttctaccggcagttggcagtccccattttcaagatatgattctcattaattgcgggcaatatcaccacaccatcgtgctagtaaggcaggggtgatccttctgggactggtcaaattcacctgtggggatcgattaggctcctaaaagccatgtcacatttagccggaatcctaagaatagaccatacaacgttcaagtttgtatgggatgatccggatcaacctggaccaacctagttcgcatcaccgaacaaaaattctccttgactcgacatggtataggaatcgccatgccggagatgcgatcgagattatactttaggagtatgaaatatgtactccgtacataagtacggagtacccggagggtcgatctaggttgccccagctgcttactagttgctactactagctgcttactgatgtaaaagagcagcccacgggtctcatgctcaaagcctgagattgggttattccccacatgcaactttcgaggaatttcccacgtgtggcatgtctttttctctggcaggtttttatattatccaatcccctggcattctatttctgttgtatgcataatgggtgttccgctggtatcaagaagtttcaaataaaatcgggagctcacaacacaaatacctcacacagtacggagtatattgtatgtatatgtgttccgtactccgtacatacctaacagatccctcttaagaaacgggtacctaccatcttgctagggattttgacactaaggcggtgtgaagggcggtaattcgaagcctggcaaatggtcgaattagaaatcggaatccccttaattaattcccttcccggagatagtcaatagggtttagaactttaggttcgtcaaagctagacgccacacataaataaatctatctatgaaactatacagtactactccgtacgcatgtcaggaactctgtggccggtatcaaggttaacggtaaacctaccaacggccaaactagtactcaggggcgttgaatgactcgagcaatttaaacgttgtcgatcggcatttgactggtccaatctcttggttttcaacgtccgagcgtgagtcgttcgggaatagctccggagctgatatacctagtccagcatagcactcgtttagatagcgagacctcattgggtttctttttcgagtgtaatataactgcttcgcttcgctccgcaatgagaataatttactcctcttctacggagtatatatatattcatccttatctctccgacgcacccgtcctttatataaacgttagctatcgcttcatacaagtctaactagaagacaacgtagaaacttgaccgagtctaattcctaacccagggtagggttttcatcctagaggctaagtcaattattataaacctactcatctagttattatcggccttagatacgcccttagttttagactacccctcttaaacctctatacatcgggaggactttaagactcacaaaagaaagacataagtatcgctcatcgtggcaaacggcccaagtcattcaatattggcttctgattttccgttccttgcagttcaacttgaacgggtcttcacctggcctcggtgatttcgtcattttaaactgtattgctgtgtgaactcaaaaccgatagacaatttacggagatcagtctgctaatatcggtgcttccatctttcgttaggaggggatcagcgccatcgaaatctcgcagaagtttctcgataagttcagcacggccacggccacggcccactagcatggagaatgttaccgatagttgcagggacagctagaaaccccgggtttggatctctaagaaggggatccttattcaaaaggtgatgaaatttgccgtctggtagttatgtcatctgatgaactcacaggctggtagccctgtaaagtgatttagggatacttgacgttcgacaaaggtggagagttctgatatgacggatggacttaagtttcgcaggtccgacaatgtagtttgtacaagtcaaacaaataacagaagagaaaattttgaacttggatggaaaggtattttggacctttgttcgggaacgagaccacgggggaaggaagttataggcttcaagtggagaagagagaagtagtagagtggggcaaagaaagtggggctagccgtcctagtcatgtgacaattcgtgaagaagcgaagatacggcacaactccgtatattgtggtttattttatttttttggttgactagtccccatgctaagagatggggaatactccgtaccgatacttgtctgtcgatccttttctataaggggatgaaattaactgatagcgtggcaggtttccactaaatagaattcttgcacggagtactagattctccgtagttagtagttactccgtaactagttaatcaattaaataataatgattagcaaattttcacttcgataggaatcccgaggtccactggtactcttcgccagtgcccagagtgcagattgaacaacagatgtgaagcctttgtggatgcctcggagacaaattgttggtgacgtcactgaataattacagaaagagaccacatctcacagaaccgagtcttatattctctatactcttcaggtctacaatggaccacataaagaaaagagcgctagtggttgtcttccccatgttcaacatccttgatgtgagcggtccagtttcagtactcttcaacaccacggacttctccgtgagctatgccgcgaaggatgagctcacaacgtctcaagagaacacaacaattaagagagacatatccctcgctgaagccaaacttcatctgtccgactatgacatattaatcgtccctggttcacgaccaaacaatatcctaccgcttgtggaaaccgatcaggggccgttatcggaacttgtcgaatttatcacctgttttgcatccgacatggaccaagatagcatgcggcaacgtactattctggccgtctgcatgggatcctacttcctagcctttgcaggtgtccttgatggcctcacggcaaccactcaccgtcttgctgtccccgggctccgagacgtaacccaacgttatgtggatcgaacccctgctgcgaaagggactcgagtcgtccccgaagatccctcggatctggtttcctacctggatgctggccagaatcaggccggagtcagaatcatcacgacgggcgctatggccaatggtatcgatgccacattgcattttgttggcctttgttcgggtcggtcacttgcgattgaggtggcggagctcattggatatcggtggaaggaaatctaggtgtgaagctagtggtacaaggaaagccatggggcagggttgtcttggcagacctggctgttttcatacattcgcaagcagtgcggaatacgaaatcaccgcatagagtctaaggtctggtgttatatgcctgtttgacgcaaacaaccacgagcgcttctcttgattgcacgatttgcccttatcaatatgtcatactcaaagaccatgccctcaatttgcccatttgtctacctggcctttttgtttgttttctaaaagcgaaagtccataatcggagttaagcatatgctagcaattgtaatattcaatgtcacccatatgcctgtagtataatgcggaccttcatcagacttaaacgtaacacgaatgatgggacgcccctaaggcctccaccaatcagataggttgtagatgcgactccacgcttcgagtgggaagtacatattgcttggaatgtaatcacaccggaaatacagaactgcaggccttgagtcaggttaaaatgctttaatctattgcccctctccccaaagagaagactatatcccagtaggtgttccaatttctagaaccttgacaagttgctataattcgaggaacacgcggtaaagctatagtacagacagagtaagctccccacatttacccctcacgttgactgcagctatcaagaggtctctcaaaatttcccgttacctcttgtttgcaatggcaaataccatattatcaatagctgaccttgaggaggcggcttccaactctctacccgtctctgcgagaggtatttattggttccccttgttgttatctccgatatctatctttaacacagataaacagacttcttcaactccggtgcaacgaacgaagtcacactccacgaaaattatgctgcgtataggaagtaccgtctcttaccaagagttctgagaaatgtgtcacttgtcgacactggaatctccctctttgaccgagatatcacatttccgctttgtgtctcacccaccggaatccaggctatggctcacccagaaggagagctggccacaagccgagcctgtgccaaaatgggcgtcaacatgggtatctcctcttatgccaatcactcggttgaagagatcaccgtcgctggaaaagaagtagggtcaattcatcatgtgatgcagctttacgcgatgaacgacaaagccaaacaagaacgaatcatccgtcgggctgaggctgcggggtgcaaggctttatttctgacagcggatagtcccgtactcggggtgcgctggaatgaatggcggaatggatttatgcctccagttggcttagggtatccgatgtatgaaagaacatctgccgagattcagcagcaatctcacgatgatgggtttagctcgacaaactcggattcccattcctgggccacggagataccgtggttgcgcagcgtcacgaagatggagatttggattaagggcattctcactccggaagatgtcgagactgctattgaatatggctgcgagggtatcataattagcaaccatggcggtcgtcagttggacgagacaccggccacaattgatgcgcttcctgcctgtgctaaagttgcacgaggacggattaagatccatattgatggtggaattcgatctggggtggacattttcaaagccttggctcttggtgctgaatgctgctgggttggtcgtcctgcactttggggacttgcggtaagtgctccttgtttattcaagaatcctgataggcggttatacttacttttttggtagtataacggtcaacagggagtcgagctgatgctcaggatcctgttcgatgacttcaagcgatgcatgcagctcacaggctgtagatcgatatctgagatcagccccgcaagtttagcagttgtcaatgcatatgggcctttgtctagactgtgatcactgttgtgattacatctggtgcccaaagccttatttccatacatgcttagctgttgccactttttgatcccggtataataataaggttctaagcaaacggagccacctgcccagaattgggggccacttcgtggaccttgcccggttcctagtcccagaggtgaggcttgtagttgtcatggcttgcatatatttaatctgcatctccgtataaagcctaggcctaaaacaccactattagaaaaatactgttgatagaacttgactatgactctttggagggggcaaaggtgtgaaagtaaatgacgttcaccacctgattttcaaccacctgccttacaactagcatttcaaccaccaacgttgcaacctgctcttcggttcgtaaagttggtagttgaaatgcaggttgtaaaaaaggtggctgagacgtaggttgaccaggggcaatcgtgagtctagaaatcaattgtcgattgcccgataacccttaactctatcgaggaattgatctgcgctgattgataataatagcccattcccagggcttaggtgtggcttaacttattgtaagttgaaagtgtatcgtcccgaggtcatctgcgggggcaaaccgctgagtcatcattggtctcgggacagctggagccgctaagctagccccgagtgtgacgccattatcccgatcccagcttctcctcattgcctaaggagtagtaatatgcaccgagactcattcagtccatgatcctcgggtaagtatcatcttctcgaaacagtttatcatttttaagcaaggctccatcatcattcaggtatgtcttcatgtccggcagctatgaggaggtgctaatagctcctctgggaccatagcaaacgtgactccaacgacctcgttgcccaatatgcagtccgaaaaaggtccgcttctggatgtgaacgaagtctacgactccgaggacaatgactttgtttccagccacaccctcgacaataagctacaaagaactcacccctgctgggcgagggccctgagaaaagggctctgcgtctttgtgatcaccggtcttattacctactatctaggcttatcgcatggtatgagccccctctcgctattataatgcgtcactaacatgatcgtccttatgactaggctctccgtctactgagaagaatccgtccccacactcggaagccccccagctttgccagtcacaagaatgcattcatgctgcttccgaaatcctctacaatttggatgccaactacgaaaacatagacccctgcactgattttgaccaatatgtctgcggtggatggagagaacaccatgacatgcggcccgatcagggatcgatatttgcgggcacaatcatggaagagaatgcccagactaaacttcgccatatcttggagcgcacagaaccgccgcagtcttctgatgctgataatttcaagaaactcaaagctgcatacgatgcttgcttggacgagggtacagtcatcaaacgtggcagcaagcctttgactaatattctggatgaactgaaaactatctatcccgcaaaggcagagggtcttgtgaaaggatcacatgatcaactcaccagcgctttgttatatctggctaatgctggtgtcgaggctctggcttcttccggtgtcactgtaagtctatgcgacctatactttatgggcgccactaatgacccctttagcccgatgatcgagaccctgataatgttgttatcatgatctcaccgcctcgtgaaatcggacttccggcaagagagtactataataacacaaagaccgtggctgattacacgaccgttttgaagcaagttgttcggggacttgctggagatggattcgataaaattgcggaggatgttgtagcctttgaaaagaagctcgcggatgtgaccccggacacccaaacccaggaagatgtcaccaaatactacaacccccttagtatcaaggaaacggaggcgctggtacctgagatttcatttactgatattatttcatctttggcgccccgtgactacaaaactgatcgcctaattgttggatcgccttcctatatgaaggcgttgtccgttctcttgaaaaacacacccagagagactattctgctcttcttgcagtggaagctcatccaagcctttgcggatgttatcgaggatgcctccattgaacctcttcggcgattcgagaatgaactcgctggcaaagagcctcaggctaaggaggagcgatggcgtaaatgccttgggcgtctggatgaagggcttgaatggagtctcagccgtttctatgtgcttgatgcgttctctgaggactcgaaaaagcttggcgatcagatcgtttccgatatcaaggagcgatttatcttcacactggaccagactagctggatgtccccagatgtgcgaagattgggcattgagaaggttggaaacatcatccagaagatcggatttcctacaaagagtcccaatgttttagaccctgaggatgtgaataaattctatcgggagctggaattgtccaaggacacattctttgagaatgaggtggctgtggcgaagtttcaacttcgcggcgaatggtctaagctcggaaagcccaccaaccgcgacgaatgggatatgagtgcaccgactgttaacgcttattacaacccgccaggtaatgagatcgttttccctgccggcattatgcagccgccagcgttctatggaccttcggctccgctgtatctggcatatggtgcatttggtgctgttagcggccacgaactttcacatggtatgttcagttgtctgcaaacctactgccattttcccactgaccaacgtgatatagctttcgattctaccggtcgacactacgacgagagtggaaattacaccaactggtgggacgacaagacagttgaagcatttgaagagcgtgctcaatgctttgtcgaccagtattccaagtttacagtcattggtcccgagggcaaggtcctccacgtgaatggacgactgacactgggcgagaacatcgccgacgctggaggattggcagcatcatatcatgcgtggaagaagcacgatgaggcaaagcctgatctccacctcccgggattggatgcatttaccaaagagcagctgttctttatatcttatggcaattggtggtgtggaaagactactcaggaggcggctgagcgggcggtctataacgacccccatgcgcccaaatcggcacgaattatcgtgagtttcgtcgatgcattcctttctttgtgttctatcactgaccgctgtcacaggaaactatggccaactctagggagttcaagaatgcctttagttgcccagacaggaagccagcttgcaagctctggtagttttgagtagtgcacttctgtcaatggcattcacttttatgagtttttaatcaattcgaggattctgacttcgtcacgactgaagtatctagctgcgcatcccatttcatccttgcccggtacttgaatggatattgatgtagctcgctcgtttttctcaacctttcaattttttaccgctgggccggaagcgttgcaagctaaaattttaaacttttagcgagaccgaagtacttgacatatattactcatcatttaaatcagcaaagcaactcgttggcaccaacgatgtctgatacatcactgacccaatatatggatgctaacgatgtcggagaggaggacctcctgctcggccaagatgccgaagcccttaagctgctgatctccacagcgatcgctgcccgaaacaagtgggaataggcggaccaggcagaggaaaagaggttatgtagttagttacagagcacggaatgaagagtcggccagtggatttagttacctagatcagcaaggacctagccccctcacttcttcagatttagatgattctaggtcccgtttttttcccaatgtcgacatgtcaaatcttatggaccagtgtcagtttgatcgacagctgacatgtgatgtctcacccgtatgcttggaggccagatcgacattgagcactccgtatattgtgctccgtacagagtcgacgagataaaggatcatatgaagctaaccagaaatagtgataattacctgacctcctgaaattttaatcatacgatcgtgggacctcagatcctcggtcatgtgagagagtccggcattagcgctagatctattaagtagggcagccaatggtcccagttagggcgttgctgcacggtagttggtttgcaatgagagaggtcacacagcctgcaatcgtatagagacttcgatgtactccgtccgaagtaaaacatctgaattgatcgacccagatccgggatatgtcagacagccggtagctccgtcaatttccagtttcgcgtcactccattacggacgattcaaccaaccagaacccctgcactgccaattttacctacgaagtgcggtactttggaggtggttttcgcttttcaccggccttccggaacgtagtgacctatcagctctggcgtgattcgtagaaagaaatgagggatgaatagtaagatattattcaagtacatgtatataccccgtactccgactcctccggaggaagagtcaggtatgtatagaaaataaagtaagtaaaaggggctggacagttctatggaagaacacgacccagcgttcccacttgtgttcttccgccgcgtcgggtcatctccacaaaaacaagagtcggatttcttccctttttttcctttctaaatttccttcgacctcataagtcatgtattactttgtatgattttgccctgaccgattccagtggtacaaaccctggccccgtcgccacgggagcattttgcgccgttctcatagctctcgcgccatggagccctttcctccacccgtcgacccgtcggagttcaaggatgcctttctgggcccgcaagtccaaatcaatgaactgccagcctcaaatcaaatgtctagtggagggccccagaatccaatcccgaatcttcgccgtgccaatactgtagctcagaccggcaatgtcaagcggaatctagagttgaaggcagctcgcgagagaacagcaactgggataagcgccaaggatagccatgagcctatacgacagaacaaattacaacggtctcaaacacatcgtggccccctagaggcgcgttcacctgggaggaaggccggccatttcaccgtaagaagtgtcggccaaaatggcaaaatatttctcaggtacaccaatcaatccataattcctcgtgctcggtcatatactgtgcagcctgctgatagtaggactatttcaataatttaggccgattgccaatccgccccagacaagcccacagcttgcatccttctctccggttgatacctcgaaatccagtccccttcagccgcagtgtcatgcacatacccgcgaggacgcaaatcctttcaggtggtcgagctcccaactatccgagttacgcccgcgccaacagcccgaagatcccgaccccgtcctcgctgtgtctcctcccgagctctcgaacctgcaccgcacgagaccggtctcattttcgacgatatcggaccagcaatcgatagccggtgctgggaagcgtggggagctgcggattgtcatcgatagatccgaagaccgccccaagtctgcaggtgagaattcgacaccagcattggaggttcctattccgcgttatcggcttgggtcgccgcgattcaacaccgaaggcagtgcaataatgcagagttctgtctacacgcgaacctcgatgtcggataactttccagattcgacactgcttgggggtagagccgaccctctactgggactccatagtccatatccccgagactctttctcgcggcatcggccgtcttttgccatttcgatgttctcaggaaccgcggcggctatggacatgaaccgagctgagccagtcccgaggaattctatggtctatgaactggaagagccggtggagccatccatttacgaaacgctggtctatgatatggatgatgggtcagttgttcgatacattcctgggaccaaggatatcagtgctgccacacctgcccgaatcgttgcacaaatctcctccgagtcattcatggactatgagctagtatcggacttcttccttacctttcgttcatacctatctacaacacaccttttggctcttctccttgcgcgcttaaagtgggcaatcaaccggctacaagatgatggacgcattattaggattcgcacatttgcggctttgcgacattggattctcaattactttgtcgatgactttgttacgaattacgagcttcggacccacttctgcgagaccattaacaagctatattcagaggtcagatctcgacaacatggcggcacgagtgatcgaaagattcttattgacctgaagcgttgctggaatggcaaatgttcggtttattggtcttcccccgacttgtctcgtgcctataacgacccagaaatatcaatcgtacctggagatgctcagattgagttgcctaaagttgaggaactgcagaaaaacgtccctattcatggaacgacgccccgtgcaaacaccacatttcgggaaagtcttgctttccccatacagcatgatcgaaatgattctgcagcaacttcacaaagcattccattctctgacaaaagcgaacagagcttgatggcactctcgtgttcattaccacctaaatctcccaggcgcttttccatgtctgcctcgaaaggcaaggcaccccgccctgtggtattgggtctcacaaagtccaagtctccgtctaggactcatgaaccacctaggtcacctgtatcttccatggtctcccggcacccatacaccagtcatagccataaaagaagcggaagcttctcagactcggtgcgagatggtcgactgccaatttttgcgatggagcctgaaacgggacccgcaccacaggagatgctcgatccggttagtttaatacgtggagagatgtaccctcctgcagagtcgtatatgacaatgatggcaccggagtcgccgcctcttcctccgccgttgaagaacctaaatcccgatcgtcggagtacaccgggtgtgcctaagtcgtcacctaactcgggtatgagaacaatcattggctcaatcaaacgagcgctgcacacgaggaacggtgggcagagcgtctctgctcgcattgcgaatgcccacgaggctatttcatcgccttcccgaggaaagacgtcggcgatgccaattggactggctttcggctctgaattctaccgggagagaaagatggctgccactcctaaatacccaggtcgaattgatctactatgtgacgaggtcctcaagcaataccgcttggccatgaaccaggaaggaacgaaagagaaaacccagccaccagctgcttctgactttcatcaagtgaccccacaggagcctgctgccaacacttctaatcttgtaccgacgcaaacccccaattccgactccaaactcaggagcggtatcaccatgggcagcgaatcaatcattatagttgatgataccggtttcgaaatgccctttatgtcaggggcagcacaggaaccaatgccaattgttaatgacaatacttgtgaaacgccggaactcgaaatgcccgataacgcctcaacgcaatcgatacccgtcgaaggagaacatctccggccggtctgctacaatgccgaaaaatcagtttcagctgctcagtcgaatatgttctacccccttcgccctcttacgccacagagatcgtcatcggccgaacgcggatcgatgcccacaagaaagaaaaacaattctctatctctccgactcagaaagtacgcgtcctttcaaagcgggatctcgaaacagcggttttcgatgggcagcgagacggctcaatccactattgactccttggcgatgcaagatcagaacaacaaacagtcagggccagttcttcgcaggcgtcgaggtggaaacctccgtcaaatgcagagtggagatgaggccgagcctccttcctgtcgtgactcgtttgcgtcttgggatgattcagccgtggatgaaatgggtagctctgatggcggtgtctcaagtcctccttcgacattgatacctccaaaaccccaatactcacttatccagccgcgcagttctcggcaaattaggcgttcctttgagtcggtcattgcgaagtttgcacagattcctgatgatggcgacggtggtatcgagtcaacgctgttgaagctggagggaaaatgggacggaccatccagcgccaatcgagacgattcgtctgcaccagcagaggggcctcactctcaccgtgagcactttttgattccgcattgcgtcgaaacttctaagcctgggtgggatgttctctctcgtaggcgacagacggaccattccgcgtattccacggttgggggtcgattggcaccacctagaccttattctgattctgttaccgaatccgaagagtcttttaactctattccgcttcttgaaagaggattgaccgacgagtccatgaaatggcagcctacaagccagccactccaatatgactcgcacggtgccccgctcaccctcgtatcgagctatgaaacttccgaacttgcctcatcacacccctcaattcaaattgtgcacgaaacggacagcatgcgtcgcattcctcgtggcgcaaccattccggcctcggccactcatgatgccggccaggttactccgaagcgcctctcagctctgtcttctgagatgtcggtcgacttgattgatccgcgtgaagctataggtgcaaggatttcgacagacacccgtagtctcagttcgtcgactgttgagatcccctctcatcctctagcgcaacctccctccccgccgatgaccatccaacatccgggatcttttacttcctatccttcaccgttgaacacagtcttgtttcaggcccagccccttacgcccgacacatccccgcgacgcaaagaagtgggcatctcttcttcgcgccctctagacatacagcaggtttcgagtgatgtgttatttaattcagaaaacaatcgttctgaccagaaccccatcatcaacactttacctgaccatgtccccttcatcttagcatgtgaatcccaggtcctcgcacaccaactgacattaatcgaaatggctgccctgagtgaagttgactggcgagatctggtcgagatgaggtggagcagtgcctgcccattagtcacaaactgggtccagttcctgacatacgaagaacgcaagggtattgatttggtcgtcggccgcttcaaccttatggtcaaatggattctgtccgagattgtcttgacccgtgacatcaatgagcgggctcgcacaattatcaagttcatccatacagctgcgcatgcacgccgcatctgtaattacgccacgatgctccagatcgccattgctttgtcttcgtctgattgctcccggttgcagagtacgtggcagttgatttcaattgaggataagcggctgttcaaggatatggagtgcttaattcagccggtgcgcaatttcaatgatttacgcgtcgagatggagacggccaacctgcaagaaggctgtattccattcattggtgagttgcaagctcgtttgcttgaatagcgcgctagatcttgttcgctaatttttcttcttctttccaggcctatacgtccacgacctcacttataatgcacagaaacccgcacaagtgaacaacactaacggcggtctacttgtcaactttgagcgctatcgcactgctgcaagaatcgttaagagcctcctccgtctcatcgacgccagtacaaagtataggtttcaacccgtgcagggcatcatcgaacggtgcttgtggattgcttgtctccccgaagacgaaatccaatcccgcagcaaagcccttgaataatctctcatttttttttttccttacctttatccttttgattgcattcctatatccatttttgttctacaatcttgacctccgtgactggatagtttataccccctttccagaggctgctttgtccctctgccattttgtaccgatacttatatctggttaatgcctctttctttggaattccttttttgtacatacctcggctatcccggcgcatttgaccttgtcagcgctcagacatttcgggaatgcccgctgtcatattggtttaggactcgctctccaaggccccttattaatttcatgtatattttgttgtctgggtttattgtctcatgattacaggccttatacgttgggatttgggtgcttctttctgcaatatagcgtgggcttggatattatatgcctcctctatggagaacgatatatttggagcgattctgcagatgaatctcgtattggtcattcgttatcaaaccctggaaaggtgttccttcttttcacatttgccatatttatttattatgtctttcccttggctgaagctatcaacttaaggtataacatcataatatattctacattcatataatgttattatatagagggatatctgattcgacaggagacatttttgcaggttaatatgggttccttacctacgatctaaatattagctagaaatgaaattctcaaccaaaacataaagcgagaaaaacctaccaggttagttgccttcattggcttcatatcctaatattatacacctcgacattcaatatcacgaaggcatgtattacaaagctgcgtcatatctcccgaggtattcggggccgcatcgcgggagctggtccaggaacggaacaccaaatccaccgcccgctcatcaccacgacctccctccaacaaccaatttctgcgcgtggagggtaccctccttacataacatatccccagagagggccacccgatctcgtcccgaactcaacccttttgatgtcccgccacaactctatcggacagccagcccgccacgatggtggacatgaccgaatcgcggcgcggggcctcagaggaccccatcgactccaatgactacagcgaccatagccccgcctcattccacgaagctaaacaggaactcccagatgatttacccagatcactggatgatcgccgctccgttccggtcttccaaccggagactgagatgtacgatgcttggcaaggtgagtgctcttgtgtccgcggaactatttccccgtttccccgacgcgggcgaccaaactatttttccttgagcagttacatcttggaaactttactggctatttgggagttcaagcattaaggtctaatcgttcaacagggcaatcacaatacctgaccgcgccagtcgccgcaaaacccttatccttcagcctagcgctcgacgatcactcgcacgacaatgagcacgaactgcgggctcaatatgggcgcgatattgaagataacgacgcccgactgatggagatgcttgctgctcaagctgcccatcgggaagtggattcgcttactgcagatgaagagacaattgccgccgacgagaaattgtccgatgacgagaagcgcgatatactccagaaaagcttgaacatggcggccagtaatggcgatgtggatcgcgtgcggaaactggtacagggcgaggccaggacttacgtggatgtcaataagcccgacgaggagggaactgtaccgttgatctatgctagttgtttcgtgggttgctcctaggtgcaaaatatcgatgcgaggctgacaagttctaacagggtcatcaagatgttgttgctgcgctcattgccgccggtgccctcgtcgacaggcaggatcgtaaccagtggagcgctttgatgtgggctatgactaacagacacaagacgatagcgaagattctcctcgataatggagcatcaccggatatcaagtcatcatccggtggtagggcttttgatttcgctcagcccggtagtgagatttctgaatatttgcatgagaatggttacaattttggctctggtaatatcgacgatgacttctatgacgctggcttggcgcatggccgtttcgaagaagaactagcagagagcgagatgaagcgacgaatgatgatggaagagagcgcaatcaatctggaggtcgatctgtctagtctagggcttgacgagaaattcgaggtcagtttatgtcgtgaaaataaggtttctcccttgactgatttgagttcttttattacatagccgtttgatgaggatgagctcgaggaagatcagcaggaatttgtctgggataagtgcctgaatgatcaaatgtttgtctttcaggaccatgagctagagcgcattttggatattatcatcaccaacatgactccccagcggtctccatctcaaaagccagtgcctgcgaatcttctcttcctcagcgcccgttacgcgcattatcatgccagccccgagctgctcgcaacgctactatcgtctgcaatggaaaagatcaatgacgttgtagaacgttaccagtgggatatgacaatgcaagccttttggttgtcaaatgccacgcttctactccattacctgaagaaggatgggggcttagcggaatctaccgtcgagttccagctccatctggcggagttgatcaacgagatattcgttcttatcattcgtgacgccgagcgtcgaatgaacaaagtcctggatgcggcaatgctggaccatgagaccatccctggactggaagatgttgccttccaaaacgagtggaagctgttccgcaaaaataaaagcaaaaaccccgagcctgacgagaagcgattccggcctccatcgccgcggcgacgagcacaaatctcgcctcgaaatatcacatctttactatcatcgaccctctttgtacttgatctctacgatgttcactcggtgatcacgacccaggtcctctctcaacttctctactggctcagtgctgagatatttaaccggatcatgagcacgaaacgttacttggcgcgcacgaaggcgatgcagattcgcatgaacgtttcgtcattagaggattgggcgcgcacgaacaaccgcgtgccagagcattacgaaaatggttctacaaacagcactggagagtccacaattgacgccgctcgtcgacatttagccccggtcatccaactccttcaatggctgcaatgcttctcatcgctcggcgatgaccacgaatctctcgtaacaaccctgctccaactccaacaactcacccccgcccagcttttgcacgcagtcaagtcataccgcccagaagtaggcgagaaaggcctgaccaagcaagcaatgaagttccttctcgacatgcaaaatgaccccgaagttctgtatcgcgagcagcaggaaattcaagaagacagggcaagggtagcagctgggctagggcctcaagcagcagcagatgcccgtccaaatacaccaccaaagaatcagccctccgcagcacccacatctcctgacactagactatccccaggccccgctgctgaatcatcgcgacctacaagcatggtcgccactaggaatgaggagcgcccaggcagcggcaatagtgtcttcgtcgaccccacccttttccttcccttctcccttccaactagtacagatatgctggtcagctacggcgctggctttggtggtacaaaccgcgaaagagcccgcaaatacattcccacagtcccgcctgaggtcctgagtcgattcgatcgtggcgatgtataaaataagacagccataaggactgctttttcttcatttccccccagcttggattattgatggcactgttcaggtgcctaaagtgcgggcacggtgggataaggatggctaataaagcgataggataccctttgaaccctttcttttgcttgaggatattctggctgtggcttccgtgtaagcatctgccgatgcgtcgagtatatattctaaatgaatctgttccatgcatacatagcattgtgtgcggtcactgtggcttctatatgcataccaacataggctatggctctttgcctagagtagaataatatacgtgatatgaactccatttggacagactgctgctcgtagtgaagaggaaggagaggggagaaagaaggggggggggtttcactcgtaggtgggggacattgctccttccagaaagatgataagaccggaaaacagacacttggtcggaaagaaccaagagcaggtactcgtaaacatgaataattagagctcgctcacagcctggaaccaaagaaaagacaccgagtagacacaaaagatatcagagagggttacgtgctaaatgcgcaagagtatgttgtttcctatttgggattccatcctcccgcccaagaaagccaagaaactcttgtaacttcctgacaactgtggtttttctgaagtcagagcgttgctgcccagctggcaacatgaagcccacctccgagcccccgaagcgtacgaacgggaataatgacctccacgaggctaccaaaacaaagacccagtgtctcccatcatatcttatccctcgaccatccatagaggaccaaccgacaaaccccaatcacgctatgagctcacgtcgatacctggtcttaccacccgagatcaatcgcctacctccacagccaatgacaacttccctacacccacagccagctgggtgggaggacaggaagatgtggctgcacgcaaaaatcgaagaagagcggcgcagacaggaagaagaaaaaacacaccgggctaaagttgtactggaacagcggcgcatcgaacagtcaatactgtcagatgctctggatgctggtgtcccacccaacatggtcccactaatctttaacggcatctataccactggtgccaatcttcaattagcggctgaactgcagaggcagtggtctgcaccttctgcgatgccccaaccgcaaaataacccgggcccagcgtcatccgcaaggcttccagttgcgccccagccgcctcagcagggtcctagacagcctcctcgagcacaagctagtgagctaccaccgacggtctcaaaccatctgcaggaaacacgccatacttggtggtcggaggccatgtcgaattcacatcgagcgcgagtgataaactctgaacgagagcagctgaggcgcaagctgatagctcagaacgtagagttcgctgacaaggacctgttggatacagcctttgaacacactttcccagttacgagctccatggtccaggcccatacttctcgatactgggctagtccttccgataagacatctaggtcgcaagaaaaacgacagcaagccccccagaaagctcatcccatggtttcccaagaatctggccggctgcagctaataaacattgccagtgtcacaaatgtcccatctcacgttcacccggagcaaacaaattcacttagcccgaagcgaaaggatcagagatcgcatgagaaagtccctccacctaaacatcgtcagaatgagacattatgctgtgaacaagatttatctgatgctgtccatgtatcgagtcccgtggaagacacaattgtaagcatcaagttggagtgatgcctaacagtgcgccactccattttcttttcttggctctaatcaattattctttcggatgttgcgtgttggtcggctttcaatgttcggtggatcagcccattggggcaaatatgtctttgtgggcgttgagggtgacgttcgagctgattgcatgcttggacctcaccttgaagagcttttgtcaatttcagagataccaaatgttgttattgttactttgatactgtggattggtcggtctgtattgttattctcacttgttcttgactgctgaatcctgcatgccaggagttactagcagcagtggaaatacttgaatggattgaatttcagctttacaaccatctctctgtactgtgaggtatagttgaaaattattagaagcgaagatgccactcggagggggcgtctttcctattcgggcaatcccttttgggtgtctgtttatgctcgctctagtagggagcttaagtaacgaaacatgtagttagaagtaaaagaatggataatcatccatgtcacatttctctggaataatcaaggttgatataaagttgtcaaaactcttggcgtgtccagtatgacattcatgaacgtcatcgctaaatgaaacctgatttttttcgtgggggacttgtatatataggaagtcaattccgcttgttaccttaactcatcttcaacctctccccaccttcaacaataacaataaatcctaccaacctccaaaatgacgaccttaatgcgcctgaagactgcattccaggcccgatccccagttacagctctctccatagcgcacactcaaacacctcgcgcctccatatgccgaggctacgcgaccaaatcctcgaatgaccccgagcaagccacaaccgatacaggctcgcccaaccgcccaatcccttccaataaagcaaaacccactctcaacgagggagagaaatcacctcttgtagaccgagaggggaatccgaaaaaagatattcccgaggatgtgaagaagcacaatcaggatatggagcagcggtatgataagccgtataacggtactgctgatgatggcacggtcaaacctgctttcaagggctagcttcctcggctggtatcctgctctgctggtgatccgtcccctatgatatgctaggttgtgagatggtgctggtccatcaattttcttttgggcttctgggttcaggcgcctgctttggagcgatgtatgaatggcttttcttatcactagatgtttttgcattaatcatgggttttgtattttgggttctctgggcttgtttatcaatatatacgtgtactcagatggacgagtgaaattccgaaaacacgtcgagtcgcttttagtactccgtagcagaacacagctcttcagatcttactctgcctactaatgaaaagtggacattagcttacatctatgttcatcggattcataggaagatcattgattgtcggtcaatctagctatccatgatgatgtacaaatcaaggcagttctcaggcttgtcccaaagccaatatccaccaaagataaaatcctaagcacattgcagcgaagtaatctgatgacacttcaaagacatctatgtgtctcgagaaagcataagttgaatttttttttggtctttttcgatagatttttgtgcatagacaggcagcttggccacgtccccacgtcgccatgtcgctctttcgtgaatatcatcaatgtgtccggaaagcaaatattacgttccaatgtactcctcagctcacaggcagcttggccatatcacccttaccgcccttgatccattcagggtcaaccagacgctcgcgctccgcgtacaattgtttgtaagcaccacgaatggttccatcactgacatgcgcaacctgggaaatctccttggcagacttgccatggcccataaggaatgaagccatgtagatgcaagccgcaacaatagacaggggagaacgtccggccaagtcacccatggcggtaacgcggtcggaaagggagacggaaacactggtgacctggtaaggaaggtcgagaaggttgcagaaacgattgcaaagatcgcttggcttggtagaggtagtcgcgttgtaatcgccagcaaaatcgtgagtttcgccattttccaaagcagcattatggcgctcgacattctgggtggtgaaaaacttctctagagccttatagatgcgaccaatctcctttcgggtgaccttggtcacagcgaagatctcggtgaaggtacgaggaaccttgcactgacgacatgcgatgaagatgcaaccggcaataatgacttcctgcgacttgcccttgaaggccttggcgtcgtcgaccatcttgaagagatacttggcggtatcagcgacagtcttctggatgttgaaaccgtcgcacagagcaccgatttccttgtaagctgctaggagggccttgttcgccttttcgccggactgcttgttttgcgcgcggtacaagtcgcgggcacggccagatcctccacttgcgatagaagtctccagttgggcgccgttgagcagagggttcgaggcgtctccgacacgggagggatcgtcattattttgatcgtcgttggagaaggtacgccattcagagtgcaaatcgatctcacggtccgcaagtacaagcccacaggaaccgcaaactgtctcgtgggagtcggggaattccaggttcgggggatcctctttgcattcggggcaaacgagatgggcggacaggtttttcttccaaggagccgcggcctcgggttttgtaagagaagtagccatattttcggttttcagataacttgagtatcgattgcggcaacgtcttgcaagtacttttggcgctatacggggtagatggtatttccgattataatagcgaaggagaagtggcgaatacagcttggcggctgtagtgaggaaaacgaaagcgggccagctgcagagaatccctcagcaagggaaaaggtcgaaaacgcaaaaaacgagctcaaggccactgttttgcgcaatcatgttagctcagcccaaaggaaatccattgtctcccgtatcgctaatttgtctgctccttaacctccaacaatgtcatgccaagatatactctaacaaaagaattttcattacctttcacaggccagagccctcggaaatctaaggagtcacccccagtcgtagaaaacccttcaccagtctgcgctttcttgggttgaaagtggaacagaaatctcgcctcagcttgtccagccgtgttgaaccagtcaaggtctccgcaagaagtctctcacgaaaatggggacaggctgaggaggagagaaagaagatgccaaggactgggggaggatgagggagggcaacgatgggatgaggtgaggcttcaataggcggcaccgagaaagggtccagatcgagcttagtaaataggtcacgtggtatatgatgtctccaaggtttgattggttcgaggaagtataggatactttttatatcaaacaaaccttctttgttcgcgtttgctgctctagataaacgaaatctaacgaggacaatgagacttcaactttggatcttggcagataagtgaaagccaacaataaagtcaagaaatttaaacattcctatacgggtggtctcgggaatttgtgtagactgatcggttcagagaagtgtggcctctcctcgtcttgataacataatgtcaacgcttgaatatagccttagccaactttcacttttcatcgataaattgaattaccgtcgactatttgttttgatactaaaatggagtgtggaagccctggaaagattcgggaacaacatggcccggctgagtcatctgccaagaaacctttccgaacagaagtcgtttgaacctccaacttcacggaaagacggatcagacctattctgttgagaaccacccctcattcctcatctacaccctcagccaagatgatgtctcaatctctccgggcctcggtgagtgctgcttgatctatagcaatcaatttcgaccctcgactaacgcgaaaagcagcgcaccctgttctcccgtgcctctcgggcacaggtctcggtcgctcgccgcaccttcctgacctccgctgtccgccagggtacgtaatttacctggggactatcttcaatataatcaagatgtcccctgctatatcgatcggtcgcattctcgctaacccgcaacccgccgcagccgaccccgtccaggacctgtacctccgcgagctcaaggcctacaagcccacccccatcaaggctggtgacgccgacgagcacgtccaaaagttctccgctcccgcgcctcccaagtctcctgaggaggccaaccttgccagcgaattgtccgcctacgagagccaggaggtcgaggtcgagggccaagccgccgccggcgaggccgcccccgtcgaggagagctggttcgaggaggaagaggaggcacccgctgcccactaaattcctctttctatttcatttagcaaggtctggggagatgcggggggaaggccggatttaaatgcctgcgccgcagctaatgtggccgcctctcgaggtcctgaagcttgtaaattagaccacatttttgaacgttgagacttctatttcccttgtttttcacctattctgcttttatgcagggtaggatttaaaaatccagggctacgccggggggttgttactaaagacaagtatttggtgagtgcagcagactcccggctagggtcatccgcttcaacttttcggtcaaagagcggggtttgtagtattcaaatgaagtacttcaagaaccatgataccacatagaagtcatctagatggtttgactgtgtggtggacaggtagcatgggcaaaatatgccatggaaccgctggtttacacaatgtgcattgtatggcttaagtaggcttattgccatgctcatgcaacaatcttccggtactgagtacccggtcaggcctcggaagtatatgcgtatggatattcatatgagggaactattggtactgactattaattattgggatctactgctgcaaccaatactccgtagatcaacatgtaacgaacagaccagaagttcatggcattgcaattgattctgatatatcaaattcatggctggcaaagctaaagctaccccgtaaagtttagaaaatcccggagcaaagaaaaggacgattcaagggggcgcaatgaaaacattggtcaccaagggtttgtacaatgtgattcatggtcgtacccgggaactcttggatacatccagagagaaaaacatcaccatttatagggctatctgtactccgtccctaactagtagctagggaaagtgatttactttggaagcgtcctaactatggatccaacccctgcaggggagattataggtagtggaaatagctccatactttggaaattgagttgactctaatcgaggcgtgtggaaagcgctgtttcttataagaaaacatcgccaaaaaaaatagagaattagggttgatgatgccattggatcatagcgaggcgatattctaacattccgtggccaagaatgagatacgagagatctgtgccggtgtacagctgtccagctgtcaaagcccactcggtgaattctgcctagtattatgttccggagaggatgcgattggtcctatcgcctgtaaagaccttgcgattggggctgaacagagagagcccaatgggctttccgaatcagacttgctgcatggcgcagagaacatggactcgagctgataccgtgagacagagcagtattacgcgatcatgatgtctacagagagaagaagaggaagaagtggagtcaaatagggatgtctcagctgaaaggaagcatctgattttaataataaaatgaagtatgattactcgtatggaataggttagaataataagttaaaaatgtctcgagttaattaaccaaggtaactaaatagtactttggagactttgcagacttgggggactatttggatttctccaacttcttccttcttcttctcttcttcttcttctctccctcacttcctcttgacattattcccccccacacacgcacccttctgccttttgcccggaccgcccttgggggagatatttcccgccgatcacttgctgaatcagagtggcgcccttgtaagcggctgcatagacgatctatccaccccgaaactccgtaattccagggctggatattattgttttgtccctctctacctctttctggctcgctgattccctcctaaagtcggcatttcagcattgcgattgtgcctcgtttgcccttcccagatgccgcgcgcctgaccactttgaaccggaacctcctggtgcacagaggagctggtctcttctacgctcggaatcttgggatttaaggggaaatgaccaataattcctatcaataaccaatctgccctccctttatcctctagacaatgtcttcgccttcactggagacgaatgatgaccagaagccccagctctctcgtgccgccagctataccgatcttcccagtcaaaccgcaacggaatccagtttaagacgtactttctccgattatgctgtgccgactttggcagaatcacccacaaaggaaaccgtggctgcagggaaagacattcttcgccgcacctctcttcgctccaaggacaggtcgaagccaaccactatctcacgtttcacattatcgtcggaggatttgaaggatgccgatttgaaggatgccgattcacatgtgccggaaaccagggcaccagagcccgctgcgaggccatccaagagccggtcaatgtctggaaggatcgtcagccttgcgaggaaaccatggggctcttcctcccgatctccgtcaccgtcagcgaaaaggtccaaacagcaggattctcagtccccaactagtttcagcggtcgaaaaacagaagatgatcagacacaaccttcccgcaagcgaacgatcctctataaacgcccacgccggccaatgctagctgttatagccaagggccccgaagacagtcccggctctccaaacagtccatctggcaattcgctacggcaccggtcctcattcgaaaaattcacagcatcactttctgtttcgaccccgctcttaccacctatgcccaagggagctgcggaaactgctgcggcgtatgcgaattccggcaccgaatctgcacggaaaaaggacgagctttggggcgtctttcgtggcttggaggcggatttccaaaagtatgcgcaattacattaacccttcatattacaattgctgaccagataataggttccaagccaaatctagctcgctgaaagctaacgtcatccgtacctcgctcctcccttttctcagccgccatcacctccatggctcatgcaagaacctcagaccggaagacctggatcgccgagtcaatattcttaataaatggtggattggaatgttggagatgctcaatggcaagcataaccagtcgatatcgggaaccgacagaccggtgttcctggaagctatcgtgggagtcatggctcgaccggaatggcgcatacccttccccatggcccagaatggagatgggcctacggaatcattgaaatatgcgtcaacttcagtgtcggaaacatcggatgggtcaggctcctcgggttcggatttcctggttgaatcgattcatcacaacatccgaaacatcttcattcaaaacctcctttctcaaatgggattcgtggtcgaacgaatgtctatgagacatgcgccagctagcctggttgctttttgtggcaaggtttgcgcatatgcctttttcttctgtcccggggtgcccgagatcctggtccgcctgtggagcacgcctcctaatatgttccgacgcatcttgtcagaatcagccgggtcgcgcactggaaatatgcgtgcatacacgcaagaactcgctctgtgctttccgccggctctccgtcccctagcgtttcactcacaatcccctctgttgcgatatctacgccagaaacccgaactacccttgaataccactcatattaactggaaccgcccgtggattgcacgatgggctgggcgtgacacggacctcttttttgtcttcgtcaaatacattcatattctgtacgctgagtatttgcccccggggactgaaaaggcaaaacggatattggcacctgggctgctgatagttcacgcgcaacttctgctcgttctggaggacacgatctacaaacaatcggcacaacaggggtccgacaatccccacacagctgctgcaatcacctttgatgattttatcgagtcgccggatgcttctgcctccactcagcatcttcgaagcggcagcaacactcatcggttgatggcagagaatcgtttgattatccttctccgagacttactgtctgcatcgtcggtggaaccaaatcgagctcgattactatttgccgaatcattttgtggcataatcaaagccgcagcgcagaaaacgtctctctttgatcataatgcatgctttttgttgtgtgacttcctcgaggaggtcattccaatcatcacacgttacgcccagtcgattgaaactgaattgtttgattggggcttttggctcgatgtttgtcgtcaaatgatgcagagccacaattcgctcacggaggtacgggtattttctttcctcttctgcatctggggtacctggactgcgacagaagaaagaaaagcatctatctgtctagacttcttgttgcatgagccggtattctatcactacttcaatcactggagtccgatggtgcgagcctattttcatcgtttgttgtgttggagggtcggtcggttccatactgatccctcatcacttgactccaatgtctatgagattctttcagatcgactcctacgagtctgggagtattacatcgggttccaatctaaggctgaacaaggcatggcagctcctttatcctctgctccctgtacacccgctccaggacgaagaatcatcattatccgatgcgagaaccaattgtctcctgtcaatcttttcgtcagctttgaccgagtcgttccacccgttccctcgaatcaactgacgtcacacaatagaaccggatcgtccgactccagtggttcagatggtcaaccagctaaacgacggtgggggatactcaaggctatgtttggcagctcttccaacccacgttccggcgatggagtcagcagcagcagttctgatgactccgagaatcccgtaccagatccaccaatgactgtggatagcaaatgtatggatgaacacgaacaaactgcgacccacagtatggacgacgagatcatccgccccaaagctctccaccagccattctttttcaaattctctttggaatggatggatcgcccgcaatggcccacgaaaaacaaacgtcttttcaccccatgtctccctgtcgcatcccaattgcacgtcgagcatcgacgttctcccgagaagtcggagtatgatacagcatcagagaacccgggccagtccgacctcgagaacgatgaaccagaaccagacatcatcaccaccgaccaagatactcccacgcagcctacctcagatacctggccgcgaacacctacaaccaagaactcccctctacctgaacttccttcccagccttcttacgatcatcttgtgtccagcaaatatgcaggccgtgccctggcggaatgggcacacattgtctccgaatgtgatagctttttcgcccgtcgtcgtgacgagggcgtccctactgatcaaatggtggaaaccccaaccctaggggttgataacttccgcaaataaccaaaatccaacatgagaaaggagcccttctcatcaacacggatcaattatagactccccgtgacatgttcaagcagatgtctgttttgagatgtttcggttcattcctcttttttgtttcttctaatttcacaacactgtgtgcatggcggatctggagcatagggaatcggcgtttacttagcctgattttgttcttccaaggatttctcatttcgtgtactaggagcgagacacgcaataatcatagtaaaacatcattcgacttgatcgtccaaagaaactgtagtagagcatagtcaactagttatatataacatttctttatgtaacaagtgatctctctctcattctaaatctaactctgctgctctgcctcccccttctcctgagcaagttgcttgttcagtaaatgcagcaaaactccctgcacatcctccctatgcataaagacttcaacaagcctcaccccagatccattctgaatctgctcgctagccaacacatccttcaactcgccacaggtcctcgccgtaaaactattattcgccgcatgctcttgatcagctccgaaatagttcagcgcctgcgcgtgtctccagaaaggcacatcattgtacacctgcttgcgtccgtggatcacccgctcaatggtatagccttcgttattgatgatgaaaataataatgttcaacttctcacggatcatcacactgatctcctgcgctgtcatctgcagacttccatcgccgatgaacaaaatagtctgactcttgctttctgtgaccttgttgtgctcacgctgcgctagcgctgtgcctagtgttgccgggagcatgaatccaatcgagagccaagtgaccgcgccgaagatgcggcatttcggaggcagtttgaagttccggccgccatgcgaggcggtgcccgtctcggtgaggattatgtcgccttcgcgcaagagcgggtttaccaggcggtagaagttgtcttgcgcgagggggtctgtgtttttgatgttggccaatgtgatttcttgtttcgggggtccggtggccttgactaggcgggtggagtcgaggctttggagtatgtttgatagaatgttgcgggcggacaggtcgcgataagtatcattgtcgatttgaacggtactgcctgaaaaggcgattgacactgcgggcttggggattgtcgtaaagtaataggtgttggagtcgctattgtgcagtccgaatgccagaatcaaatctgcctcgtcgaagtactcctgcgctgacttgtcgccaaaggctcctgcgtacaatccgtacacatttggcagctgctcgttgactaggcctttgccgtacacggttgtccatgtgggccagttggttgctttgatcagagcatcgatctgctcgacgataccaagacctgtgctttctccgtccacgaagatgagcggacgcttggcactgtacactttctccaagatgcgagccagcacttcgggctcttgtgtagagcttggtggttgaggaatgctgatctttgtttccaaatttttagccgacaccagcacgtcgggcatatcatcgggcaattcaaggtagaccggacggctgtggaccaacgcctggcgcaggacatagtcgatccgttccggcgctgtggcagcgtcttccagcctcacttgagctgcagtgacatgcttcgacatgttcgcaaagcgacggtagtcgccatctgagaaagtgtggtgcataaacgtgcgcgcgctctgaagtgggcgcggtggagttccgacaatgtgtaacacaggtgtattctcggcataggcgcctgcaatgccgttgatagcggacagctcgccaacgccatatgtagtgatcagtgcagacaggcctttgatgcgaccatatccgtccgctgcataggcggcattgagttcattgcagttgcccacccagtggagaccggcgggagtgacgaaatctaatagacgaaggttgtagtcaccagggacgccgaacatggagtcgacgcccagctggcgcaaccgggtaaacaggtactctgcgagttttatatcttgagtcataatgaatgtgatattgaagttaagagagggacgcaaaacgagtatttatagatggatggaatggatccccgcatcttatcggcgacacgccgattctccgactctccgatctcgccattgttagccgacttcacccttttgtctccactggcgggacaaactccgcgagaccagccatgtcacgcctggctgcttgtgaagcctgcagaaaggctaaactggcatgcgaccatcagctgcccatttgcacgcgttgtagtgctagcaaggggatttgcatctataggactacgcccttcaagcggagaagagtcgagaagcaaaggtcagtttcatacttgcctggattgtatccgaattggctaataatatatttgcagcgtgaatccaccagataaatcgccattatttaatccaaggcgtaatccatacccaaaccctgggtatctaggatcatctagccatgcagctatattcaagcacatcactccggacggagaccatggccccggtagtcatcaagtcgcaccagaggatctgcactcggatttctttggggacaaccatcttgtcctacagggtgcagatatcctcaaacatctcttgacaacatataagttgtccgccatgaaagacctcgtcatgttctggctagctaaaggagccaatctggccctggcagagccctttgttgaccaatgtgcccagagcgtgagccaattgttcacatatcatgacgacaactggcatctagtctatgcaagacgtctcgtgcagaactcggccctaccgctacacttcaatgatacctctgacctggctagtttctcggctcaatttttggatcacaattctcgctgggaaacgttggggatattctttgccgctgttagtcgtgcgacagttgacatcgcgttctttccgtctctatatactactgagcaagagcagtacacactccgaagattgtgtactaaactttgtgattttgcattggagatatctctctctttagattgcttgaatgatctacaattgatcatgcaatacgagaactttatcgtccattcctacgtggatggagatcagagtaggttgcaagccgcaattgttacctccacttagccatatgttaatttctcaaaggctaccattcctggcgcaaactgggcgatgcaatatcttccacatttgcccttggctaccacgagaacatcgaaattaaagcaggaatcccgccattcctcaaagaattgcgcaaaacagccttcgcgcgtatatactccgcagacaagaatatagcaatattcctcggccgcccaccacgaatgaacaaacgcttctgtcactttcaaatcccatcctgcaagaatgcaaaagaaggctcagccgactggaccccagacgcggaacccgggtaccgggctgacacgcggtggtctgcactgtgcgcatcactaaaggaggagatatgggagcttcttcaagacaagcatgatccatcatgtgcgcagcgagcaaggtattcaaaagcaacgcaatgccacaccgaatatctcaaagtaaacaatagctaatcaagaaatggcacagtgtgatacagtgccaagcagagacgcagtggcaacaactgccatcccacttccgactcgagagcagcctaaagaattgtacacaaggatccttcgagcgagacttcgtcgccggtgtacgactgcaccacttgcatgtgctattcttgcttcgtcttttgcttcttaaatcaccgactgagcccgatctaccgatcatcgagacggcgggtcagatgctcacgctcgttgtggagattattctgctgcgggatcagctcactaattctgggacgggtcttatttggaaggtatgtatggaattgacttgatgttcaaattaacatactctgtctacaaaccccccaacttgcaagcagtaaactgaaattcatactaactaggtcgcatactacggtctccccgctgcggggataatgcttctggccatgttgaaacagcatatgccacgagcgcaccgtacacggtcgttacaagatctcagtgtgtttgtggcggaggttcagatcggcacgattgtaaaagcaggggacccaaattacccattgctttctaaggctacgcggactatacagcgttttttggactcaacacattcggacccagcgcagcctttgcctgaaatgaccgaggttgaggggaatgatgagtgggcggcgttattgagtcaggatttgtgggattttgaggctgggttttggcagagtttggcggatcatccgtctttgatggcgattgagccttctttgccgtctgtctagtttatgatacctatgagtaaaatatgagttgggctggaagaaggctcttcatctcttcatttgatgtcatatactcatactgacttttgacttagttttgactgtctttgtctaataactagcattgacttacatggtagtaggtcatagccaacatccacattgttataagagtgctctttcccgctccagtccacccggtcagtaggaccctttccacatacaataaccatggaaaatcatataagaagactctgaaaatgtgactcttacataatgaaatatttccatttggaaaatgaagtactaccctaagggtggagcacttggagcgagcaagcaaaccatgtggactggcagggttggaaccctttagaagctagatgatatatcccaatatgaacgccggtgcctggggcaaggagaagctagatacattcaagaaaagatgaggatgaggcgaccaatggaaccaacagaaggacaatctgctaaggcccgtatgagctcaagacatgcgtggtatatgatgggcgtaaaaagaagttcccaaaatgcaggtatagaggtattccgacaaccaagtgacaggtgtcgggctgtacagtgctcgtttagaacatgataatagaatcaatccgataagagcggatgaagtatggcggagaagaacgacaaataggaaaagggtagatagatagaatacattaatggagcagcttgtcgctggcgtggtggatggtgttagcgacccggtcgatccaatattgggtcaatgtccaattccccgtgttgatgctgtcgcggatagcagggaagatcgagggatcgtagccggaccacagctctggcccaaagataacgtgtcggaattgtgtgcggttggggatctgtacaaatcatcagttagggccgaggaatgaatcaagcagaacgtcaacttacacctccgccttcttccaagtcaagtagattggtatcaaaagcagccattcgagcattatggttcacccgctggactgccataacattgctttcataaccacccatgccccatacagtatcgtgccagattttgttccaggactggaatgtaacagcattggctctcatctcggtcgcagccctgaacatgggctgcatgtctacctcggcgttctttgatttggcaaatttgtccaagtctttgacccatccgacaatggagtcgccgtagacttctaggtcaaatggcagcatgggattctccgaaaggtctagaaggagaagcccccagaattgagccaggattttgtggtattggaaatcggggtctgcgttattaaccatccagtcatatgtttcgtagcagctgtggtatggatagggctcgccctcaaatccgaagtcaatgctcgaagtgccagcgatatcctggaacgcaacataatcacttccagcgccaagtggagtaatccttgagccctttttatcccaaatgtctttcagtgttgcgttcgcataggggtcagagatacgacctagaacctgtagcacggtgcgctcaaaaacaggcgacgcagacacacggaaatcggggcccgcaacgcccacgtcgacattcaggtaggcaaaggcatttgcacggagatcatcgatctccttctcgacatgttcggttgagccgatcaaattgtactcctctccgtcccaactgacaaattcaatggtgcgaagtggtcgccatccgtaggtgagcaactcgccgaaggctcgtacaacctctaggaaagtagcagtgccacttccagggtcaacacttcccatgcaccacgaatctcggtggttgccaacaatgatcttcttgtcacgctcgtccattccggttattatgccgtggatgttgtagataggttgccgctctatttcatcttgcaggttcatcagatgaacgatcggggagtcctggtcacctgtccaccactctggtacgtcaggaacaccgcccacccattcctttggtactttggagccatggcctttgaggccctgcaaaagtatctgtgcatcgcgccaagcaagtgggagactgggaatcttgggtagaccggggctgtcctcgggggacagacgatggttttctcccggcgtagatgcccatccagggctgagaacatcgccaattacctgcgacatcatactgacaccgcccctttgcacgccatcgcttggcatgtatcgcccttcggggaaggccgggcctttgacaaatccgtcctgagcgggatcggagtagatgatacagccggcagccccggctaattcagcagccttgattttcaatgcgcgatctgattcagtaccatagtatcggaccaaggcaattgagccatcgagtgaaattcctttatttgcgagcagctcgaaatcttcccgggatccgaagttagcatacaccagatgcccagtgacattgccggatttcgaatggccatggaagatcaggtccttggcgttgtcctcttcgagtttcgcctcccaagctagactaggtggatcgatgatggcgactctcctcccatccttgcgtgggtagttgaggtagacctggaattcctcccgcgacacttcatcaaaccctgcattctggaactcttgttcaatcaattttgatagcgcaaagctgccttccgtgccagctacgtgggtgtagtttgtgactcgtcgcaaattatcggcgatattggtctcgttgatgtggccttgaatgaagttctcgacggaggcggcgctataggactgacccatggccatgcgactgttgatattgaagacatctgcgatgaagaacacatacactaaggtgaccaccagtaaaagagcgaatactcggagaagcatgatgcacccctgatcttttaagcgtgccctagcgtcactaaggttgatcgtgaagcggaaagtaggcatatatcgttggaagggtcgttgtatagcggacagggtacgacccagactcgatagctgcttggaaaaacgatgtcgtagaggggtgtgtctgccggttaaggaggccgatgccgaatcatccacgtccatctggtctagctcccgccgtagttcttccaccgactctcggtctgagtgtgaggccaatgattccaggtcatccaggctagagcgcgccgattcgacggttggtgggtggtagccgcgggttgcggcatgatcgcgaccgagtagcccctgtcgttcaacatctgttccatcgccaaggtcggatcgagatgaggagggttgaccggtagcttcggcgtaagaagggatggggacggcctgatagtcaaacttctcgtcgcccattgtgggagatacggggctccggagagctgtaactagggtgtaacgcgggtgcggagatctggaggatcatgatctgtaggaaaaaggaaaatgagcgacgtccgacatcctatgccgatgaatgagtatgtccagaatccgatggagttgtataggagagagacaggagataggcaaacgcccccggagtgagagtgacccacgcttggcaactcggtactgcattacgcatcatttagagattgggcattctttaatgctatgacaacatattagtagattagaatattttttattagtccaaaccggtttgggagtcatttcttttttatatatgtatcagacctcggacgtgcagtgtcgtgcagatgttctccattatgctacggagtacataccccatccacgccagaagatgaagatccgagggcagtatcagaataatacaacacagcaaaggcagactgaactccgtacagcatagtagacggtataagtgaccacctgagaagagtctcaaagacttcattatagagaagcaagtttcgggctaattagctaaaacatccgaagtgatgccactgagccatcttgaggtacgaccgggaggtccattgctccactaagcaatgattcgaggatgagaaggaaccttccactattcaagatattaaaagatctcaaagagggaaagctgagcctggaagatgaccggagtggagacaagagagatcgataagatggcagactcagttttacaccgtagcttggatgttgagggttttaattttcaaagccacgtagcggattctaacacagagatgtaactatgtaactgtttattacctaactatgtgctagctagttacttactgtcaaagttgatgttgaagtggtaagttagcggggagtgttgtatacactgcatcacggggtccacgagtcacgagtatagcttcacgtccaaatctccccgtataaccacttcttatatatctcctggggaattatccggcccaaaggaactgcaagagaagtagcaaaagagggcagatctccccactcgaagaaaaaaagaaaacgcgaaaaaaaaagaaaaataataagtggtgacagatcgtacacggtagaaccgagtacacagactccttttcattcttatatcagtcgccttctcttcagacttctccctcttctcttgatcttaacctcaacctccttcatatacttcatctcagtcatcttccttcaccctcaccttctattcctcttataacacaaagttacccctctataccccccaccatggctactcgtccccaaaacatcggcatcaaggccattgaggtctatttccctactcaggtaagggttccacgtctatcgtatcccctgggatcgatgctgatttgtcaattgtagtgtgtcgaccaggtcgagctcgagaagtacgatggtgtctccgccgggaaatataccatcggtctcggacagaccaagatgagcttctgtgatgaccgcgagggtatgtgcacgggcatattccaaaggggatcaagaccaatcagctaacctttctcggcagacatctactccatgaccctcaccgttctctcctccctcatgaaaaaatacaacgtcgaccccaagtccgttggaagactcgaggttggcaccgagacccttttggacaagtccaagtccgtgaagtctgttctcatgcagcttttcgctccccacggaaacaccaacatcgagggtgtcgataacgtcaacgcctgctacggtggcaccaacgctgtcttcaacagcatcaactgggtcgagtcctccgcctgggatggccgtgatgccatcgtggtttgcggtgatattgctctgtatgccgctggtgctgcccgtcccactggtggagctggctgcgttgctatggtcatcggccccgatgcccctatcgtcttcgagcccggtctccgtgcctcctacctcacccacgcctacgatttctacaagcccgacctcaccagcgaataccccgttgtcgatggtcactactcccttcggtgctacaccgaggctgtcgatgcctgctacaaggcctacgacgcccgtgagaagaccctgaaggcccaggccaacggtgccaatggtgctaacggtgccatcgacgagtccctgacccctctggatcgtttcgactatattctgttccacgcccctacctgcaagctcgtccagaagtcctacgctcgtatgctctacaacgacttcctggccaacccctctcaccccgctttcgccgaggttgcccccgagctccgcgacctggattacgagaagtctcttaccgataaggtcgttgagaagaccttcatgggtctgaccaagaagcgtttcgccgagcgtgtcaaccccggtctccaggtcgccacccagtgcggtaacatgtacactgccaccgtttacggcggcttggccagtctgctcagcaacgtcgctttcgaccctaaggagcccaagcgcatcggtctgttcagctacggttccggacttgccagctccctgttcagcgccaagattgtcggcgatgtgtccaacatggttgagaagcttgacctccagaaccgcctcaatgcccgcactatcctcgagcctgctgcatatgatgccatgtgcaagctccgcgagcacgcccaccttaagaagaactttaagcccactggtaacatcgagactattggatccgatgtctactacttgactgaggtggatgacatgttccgccgcaagtacgagatcaaggcttaaagtttctttgatgttctgcgattgcctttaccgttcaatgtgttgtttagacggttcaaagagattcccccgagcgttttgagtgtttcgtcaaggtgcatagaagaccttttttcgttttccttttttactctttcggttaggtcatttcgacccacatgaaatgaatgtcatgaaataattaaaagacaaattaatgagatacaattctaaaataactcggtactaaaaggtcgatattaactacacacaatgtgcactaacagcagtgaaacaccgggggtcaatgcacggttatgggttgaccaccccgatttaaccacctcgatttgatctcaacctctttctaggtgtctcctgcatgaactcctcatcaactgcattaatcgttgctaattatgggacattgcttagtttcaaggatcaaactatccaatcactggatatgacgccaggtgcccggcgcgtacatcaaactcatcaccacacatgtagccgccgacgtcgatatcacattcggccactggtgcatctagagcagctactctcccttcaaagggtctttttaccctgctcagaccatggaaccacacatttcataaccccgatggctatttttatccgtttgctttcttggaacccttaaccgctgaccccgcgagtcctgaagcagaaaaagtcaccaacaagtctgctaattaccctgcaatgtgacctaattgttgccgtttttagaacgcctcgagaatcttgcagcaggctaaccatttgaggcaatctgaagaacgatgttggagaaaatgcaaaatatagtaacatcttaacgcgcgacagtccgatgaaaccgcactataccggactagacccccttcgaggggtagtttcaagggcttgttgctcaacatgcctgtcttcaggcacaatgtcggcagtttcgtgtttcatcgagtgggtatgcctctgatcggagactaggatcccaaaaaaagattctcaaggcgttacaatggggctcttctccatgtttcatcttttctagatcgactagggttcgtccgtcaatctttttatatacaccatgcttggctgtttgagactctgtcgatgttcatttaacatccagacatcctccttctgaatcatgtctctgtgaacgacttggtcagacatcagatccttattcgtttgttactcttatgatatattgtttcggtgatatacctagtcaacaacttcactatcatgtctgctgtcgattccgctcgctttcggctaacgacgccgccgcgtctttctcttgaggagtacatcggctctggacatagtcgtcatgtctccaactcttccgtctattcaagcgagtcttctccctggtcgactatgactggaaataccagtcctaccacctcgccaactagacattatcatggcccgaagctattgccaaagatcaggcctcaagacgtcgtgattgagccagtgtctgctggcgggcctcttcgtaaccgtcgcgttctctctaatacacggaacccgcctcctggattcatcccttacccactggtgcggccatctgtcaaccgcacacaagatgtcgcggaccgcttgacattggcctctcccatctcgccggcgccaatgactacgcagggctgcttccctgccttgtcatcgcccgtgactatcaccccttcgtacaagcgcaaggcaggcgggagccactcacgctcagtatcggcatctgtcatcgatgccgccactttgacccgatttgggtatcccacctaccgggagctgccaaaatatgcgcctcaaatgcaggcccagacgaccccgaccaccccagttacgccaattaccccaaacatcatgccctatccatcatattctcaaagactgggggtgcagaatgctcctgcaactccactgacagtgccgacacctcaatataactaccgccacgcatcggctgctcagcattcaccggtctcgctcagtccccaggagaacctaaccccaaggtccactactctactgtcatacctgaccttaccaatccaaccaatcaatctagtccgcaacgttagcgtaattcctactcgcggtctacacgattacttctggtgggacatccgtaacctgcgcagctggagctccttctcactggcggcattcgactccctggatagccgactaattcagctcctgaagaccgaaatcccagcagagctcacaccgcacgtggcggtatccccggcaagcctagcgccagaatcagaacatgacctagtgagcctaatccgcgacctctacgcaccgcccgtaaacgccgccctagccgtctcccaaggcgaagaccacctccaactctacgctgccccagacatgcgcaacacaggccaaaaaaaccacggccatccgcacttcctagcaaactatgcctcagacactgagcaaacaagcgccggtctcccgcgcggccgactagttggcatcgtgaaaagcttcgaccgctggaacaccggcatgcgcaacgaagccccccacaggcgcgtaaagtacctgaacggactcgcccacctgcagcggtgcatgcgcgagcactcctgccgctacggttttataatcaccgagatcgagctcgtctgcgttcgagcaggctgtgacaccggcgacgacatcccctactttgggtacctagagatcgcggcatcaatccccctcaagacagcagctacaaggagcgggcgtgcacacgcgcgcgatgcacctctcacaacacccatcagcgcgcgctctttctcgtcgtcattcccctcgcatcatgactcctcggacccggacccggttgaggatgcgttaccggctatgacggcaggtctaggcttgtactttttgttgatgctttcaaagtcggtgccgcttccgcatcagccttctgctcatctcaacgttggcggacctggtgcgatgactcgtcagaggattttggaggagccgaaggataagtggattcctgagccgcaggttggagagaaaagggatgctaaaagagtgagaggctgggtttggccttcggatccttggcatcggagagaagggggtgcgtctaggcggaaggctggcacgaaggctggcgcgaagacaaagaaatggcataaatgactctattttctgtaggcacaagtttggcttttatgatggatgtttgggatttaagtatattttgtttcgtttctcttgttgcttttcttttttggtggtttttggtgcctgttattcccccctgcaaatctttcctttcatagtaatttaatttcttttcttcttctcgtcttgtctcatattgaccaatcaaattgggcttcatggatccgtcatgaatatatattggaaggtcccagggtttcaattgaattcaatttcttaccttgtttcatctccgctccagggctcttatggatgtacacagtggccgttatagagctgttaatgcttgccgtaccatgtctaatgtggcttaattgggtggaggttcgaacaagaggccaagcgaaatcagcaacattaaggatttgtatcggatttggtgcatttttttctctggatggaattcatggccattgatgcttatattcacattgctagatatggcttgtgtatgtatgtccaacactacatggaaatgcttaagtataaaggccaaaatgattcaagtcatccctaaggtcctcaaagattgactccaatgtgatcaaatccgtgatgttaattgtggagtatgaagctgtcactatatgttgtcatccctcaaggaccttggggacaagtacctcgatagtcagctcacgaggacattgtagaaatatagtcatgcccgtagaatataggctataaagaatagtatttctcctatgatcgtacgttcctgcaaatttactattttgttgtactactataatcactacatttttctcatacaccataactctagccctacctcgcctttctaacatgtcggtatcccaagaattaccagaagacgatgagatccgcgatgtaatcatcatcggtgcaggaccatgtggcctcgccgtcgccgcacgcctaagcgaagaaacaccatcagcagtcttcacagacgaagaacaccagcgctatcactggataaagaagcacagcgggcggatgaatcttgtccaaggacgacacggcaagattaagggcgtacgagccgcaaaatgggatagcgaacgccgatgtcctcgtcaagaagacccgagacgtacctctgaccctgcgtctcctgtaccatcactatcttccgcatcgtcgacgtcgtcaacatcctcgacatcatctatctcaactcttgtgctcgatggctctggggataaatggatgcagcggtggcacaatgcattccgcacgctggagatcaaacagctccgcagcccgatgttcttccatgttgatcccggagatcgggatggtatgctggcttatacacaggagagtggacgggacgcagatctttgggagatttctgggtgcgttgggaaggagatgagtaaacataagaagaagaagagaagacagggtgggcaaactcagtaagtggtgtccagtgcgaatgtggttgaaacaaagctctaaccatgggatccttgtaagcagaacaattggagctgaaatagacgaacgtgatcggaaagattacttctcgccttccacagaccttttttcggattattgttcgtcgattatccagcggtatggtctggatgagcccggtaaaatcttgcagcgtgaggccacggatctctcgtatgattatctctccgatagttcaaccccaaagctgttcactgtcaccacatctaccggagagaagttttacagtcggtctgttgtcctggccatcggccctggcggagcaggtgtatcgaagatttatccgtggaaaccctcgacggaacaagagggtgctgcagcatgttgtcacagtacggagatcaaatcatttcccagccccaatgtacagaacaagatccagcggcggcaggaaaccaatgttgttgtcgttggaggcgggctgtcgtcagcacagattgtggacatggcggttcgcaagggtgtgacgaaagtgtggttcttgttgcggtccggcatgaagggtatgtataacatccccggtaatcgttgaattttggacaatgtctcatttgaataatagttaaacacttcgacattactctgtcatggatgggcaagtacaaaaactgggagaaagcagccttctggtctgctgataccgatgaaggtatttgttaaaaaagccctaaaccaatctaaagactgacactaatatatttctcagagcgccttgagatgcttcaaaccgcccgaaatggcggcagcattacaccacgctacacaaagattgtaaagcagcacgcagctaaaaaccgcgcctccatccacccttgcacagtaataaaaacccacgactacaatccagtaaccaagacctggaccttaacaaccgacccaccaatccccgacctccccgcgatagactacatctatttcgcaactggagtacgggcggacgtgcgcgagatgccgctgctccgcgaaatgaacgataaatacccgatcgaggtcaagtcaggactcccatgtctaacgaatgatctatcgtggcgggatgacgtcccattattcatgacaggccgcctggcatctctccggcttgggcctggggcgccgaatctcgaaggcgcgagggtgggcgcggaacgtgttgcgtggggcatggaggaggttctgcataaggggcgggatgttggtgggcagtgtgagggcttctgtgggcttggtaatcggtatgcttcgctgcttggggagtgtgatgaataaactttttctcacatcgttgtgaaggatggtatcataatgcacaatatacttgttcttttggactgcagatcatacttttttggatctgtgacgaggtgattggagatagtacgacatttatgctggatatgtacattgcctgctacattcctccctgcattccgtgaatttacgtttcagtcgccagagttatccttgactacccgaggatactacggggaaggctggaaatttattgggtcagaagaatgctgttgatctcttgttctccaaggctgtatactttcaatataagatagctggtatagcaacatggggttgagttgagtctatacggttcgacttcactttttctaggaagcccaatatttgctagagcatataacatggcgacaaaggcagatacattggagaaggagccccctatggagatattcaagctcctaccgaacaacacaaatcctaattggatcaaagatagggggctccgtaaattgaatttggctattgtgttcatgttctccagtgcttcttcggctgggtacaccgcaagtcttgtgaacagcttgtttgttctacctgagtgtaaagtctccatcccgatattgtgatatttatgctaataatgacatagttggtgctatcattggcggactagaccccaatatagttggtttgataattgctgccacttcacttggggcgttagtctccttcgcaccggcctcttatattgctgatgcattcggacgaaagacgtgtattttcattggggccagcattgtgatcgtgggagctatcatccaaaccgcagtcaaaagccactgggccttttttggcaccagagtcttgtccggtatagggatgggcatcgcccagactgcatccccactcctggccactgaaatcgcacacccacggcagcgacagacggccacggccctgtacaatgcatcctggagttttggcgttattagtgcggcggcggttacgtatgcaaccataggaatagcaaatagttggtcgtggagacttccttgtctgctgcaaatatcgttcccgttgttttcgatcctagggttgatcatgtttgtgcccgaaagcccgagatggcttgtgtccaaaggcaggaaagacgaagctctgagtattttggggaagtaccacgcgaatggagacacagacgacgagctggttcagtatgagtaccgtttgatatgcagcacgatcacagccgagatcaccaataccacggattggagctccttcttctcatcgagaggcgatatgcaccgattaaccatctgcgtattagtcggacttatgcaagaatgggttggaaatggtatgtacaacgccctaaaagagacttagtcactaacggcatcgcaggcctcttatcctattacctcgcaccgattctcgcatcagtgggaatcacgaaggcagccgaccaagctgctgtgaacgtcagcctcaatgtctggaacttcctccttgcggtagctggtgcatttgcatcggaacgatacggccgccgcattctatggcttatttccacgggagccatgatcgttttcctgtccatgtccacactggccgctggtctatttgccgaaaagcatcttcctgctgctgggatagcggctgttccgctcctgtttctcttctttggtgcatacgatatcgcttatgcgcctctcttcatatcgtatccagctgagatcctgcccttccaactgcgtgccaaaggcattgctgtcaccctttcggtggacgctgtggcgtgttttttcaaccaatatgtcaacccagtggcgtttacggcgattgcatggaagtattattgtgtctttcttggctgtctgatagtgttcctgggtcttatatacttactcttccccgagacgaaagggcggtctttagaagaggttgctatgattttcgacaaggaaaacaaatcagagggtgacagagaagaccgacaagatacagatataatatagatagtggccatggtggccaatcaaagcctggctgatgttgctgatgtttcccccgcagttgcaacgcgcagttacagttacagcgcgtgtaaattgcaacctctcgcgctgaacatttgttggttatatataactatctctactctttgtttagccctaacaggataaatagaccttgtcagagtcgaaaatcccctcaattattcgtcatattgtcatgttctagatccaaaagctccaaagctatcccaatatttcaaccaaacctcaaatcaacatgaaagaaccaataccacctcccacggcgagtactcccagctactccttctcaccatcgaagcaactgcgattccttgtcatcggcgccggctctcgtggaaacgcctacgcccgtgcagtcacaaccgtaacaccgggtgtaatccacgcaattgccgagccccacgcattcaaacggcgcgagttcggacgaaaatatatatggggcctatccaaatcccatccagagcatcaagagggccaggaattcacagattggcgcgaatgggtgcagtgggaactggagcgacggaagcgggcgactcaaaacaatgaggataacacagcagacataagcccaactcccgtgggggtagacggcgtcttcgtctgcacactagacgaaacacacgtcgagatcctacaagcccttgctccgctccaactacacattctctgcgagaagccacttgccctctcgctggacgactgtctaacagtataccgaactctccaaccaccagaaggcccaaacaacaccccccaagccccaaagaagatattctcaatcggccacgtcctccgctacagtccgcacaacatcctccttcgcaaactcctcctgacagaccgcgcaatcggcgacatagtctccctagaacactgcgagccggtcggctggtggcacttctcgcacagctacgtccggggcaattggcgacgcgcaacagcagcgggcgacggttccctcctcacaaaatcctgccacgacattgacttcatcctctggctcctctgctccccaccctcgcccgaaacagcatccaaacaaggccacaagccgcacttcccgcgctcgatctcgtccgctggcacgatgacgcagttccgccaaaagcgcaagcccgtttccgcaggcaaagctacaaactgtctctcctgccccgctgaaagtgactgtaactacagcgcggttaaaatctataatgaccaccatctcgcgacgggtcatacggcttggcctgttgacatcgtctgtccggatatcgaagatgtgttccgtgcccaaggcggcaaggctgccgagtcgctgctcctatcctgtcttgccgaggactatgaccgggatacagtgtcggactcggatatcgctgtgcgaccttggtacgggcggtgcgtctacgaagcagataacaatgtctgcgatgatcaggttgtgacgtttgcctgggatgatgaggagacggtgccgcatcggcttgctaaaacggcgagtttccatatgattgcgccaacggagaaacagtgtgagcgtcggggccgggtgtatggtactactggcgaggtttcttatgatagtacaactattactgtttatgattttgctacggcgaagacttctgtttttgatgtgccgaagccaccaccggggcaggtcgaatcgcatggtggcggagacttcgggcttgcgaagcagtttgttagcgctgttgaggcagttgagggggggttggatgttgaaactgcacaagcaaggtttgttgggtgttcactcgaggaggcggtgcggagtcatgctgtcgtttttgcggcggaggaggcaaggagggaggagagagttgttaaatgggagagctggtggggagagaagttgagggtttctgctgctgcgtggaaggcataattacatagatgggtttgatgatttacaattctacgatgctacgattctatgatacttttgtttgatatctggtatagtataggggacaataatgcatatgcttcattagcttcatagacctggaggtaagccaagacaaactcggattataataaagatgcagttcatctcatgccaacgtatactcttctaatctgatcctgcttttcgatcatcattcttctcgcgtccagatataactgcaaaacaattataaggtgattcccatccagcaggttccacattgaccctaacaacctaactaaacttaggtcttaacgtcaggctcctcgcggccaacatactccttgaacttgagcagagaaagcgccagagagatgttatcagccaggtactcctgagcagtgagaccgaacttggacttgtcggcctcgtagcgctcaacgtacagacggatagtagcaccgctgctgccggtgccggacagacgaacgacaatgcggctgccatcatcaaacttggcgtacagaccttggttgctggagacgctgccgtcaaggtcggtgtatgagaagttgccagcgtcaacgaccttgcgaccggcgatttccgagccaacgaaagtgtcgcggttggcaaccaggtcggacagagtgccaacgaccttgttggcgccctcgctgtcaacgttctcgtagtcgtagcgggtgaagaaggtgcgaccgtatgtctgccagaactcgttctggatggagccaatgctaggggtctcgttgggcttttgcttggcgacaccggcaacgatgttcaaccaggccacgatggcccacaggccgtccttctcgcggatgtggttgctgcccgtgccgaagctctcttcaccgcagatcgatatcttcttgtggtcgaacaggttgcagaagaacttccagccggtgggcacctcgtagctctgcagaccttgagccttagccacgcgatctacggcaccggaagtgggcattgagcgggccaagccgtatacaccctgcttctggaagtacgggatgagcttggcatggtgggcgatgatggccaagctgtcaccgggggagacgaaactgttggcaccgtagatcatgttacggtcaccgtcgccatcactggcggcaccgaagtggacgccgttcgcatcgacggcctccacgagctcgtgggcgtacacgaggttgggatcggggtgaccgccgccaaagtccggcttcggctggcagttcattgtgctgctggcgggcagaccgagctccttgacgaagatatccacaccgtagggaccagtcacaccgtgcatgccgtcgaacaggaccttgaagtccttgtgggagctgaggaactccttgatcaaatcgaaatcgaagatctccttcatcatggtcacataatcggcggtagagtgaacgatctcaacctcgaggggaccgtagttcttggtgccaatggtggaggtatcgacatcaggaacatcgaggtatttgtaggaagtgagggccttggcagtctcgaagatcttgttggtaatgccctcgggggcgggagcgccgttggccaagttgtacttaataccaaagtcgttctcggggcctgaaagtgtttggtcagtctccagcagatctcgtaatactcccgaccatcacttaccaccggggttgtggctggcagtcaagaggatacctccagttgccttccgcacacgaatgaggttgctagcagccggggtgctcataattccatgctgtccaatcaagatcttcttaacgccataggcggcactgatctttgcgatcttggagatgacctcggggttgtagtaacggccatcgccaccaatgacgaggaaggaaccctcaacaccctcgggaatcgacaggagaacactagtaatgaaggactcagagtagttgtcctgctggaagaccttgaccttcttgcgaaggcctgagctgggagcaagttagctagcagttcaattgtggggcaacgagtaacgtacgttccaggcttctgatcagtgaagggctggatagagactgtctggacagacatgatggaataagattggaggggaagaggtacttaggagaataggagaagaggggaagaagttcgagaagttcaccgacttgttgagctccacggagaggggccaacgtttggcgtcatgtgttgatcattccgctagtactcttgtagtactttgccacaacattttaatctacttcgtatgtactctgtacagcccaaggctctgatttgttctattcagtctaatctataagttgttcgtcaagttactcttagaaattgtccatcgcaggtcattccggcgggggaagcaagagcctgcgtcttgtacaacaacattattccaaagtatattgtacactgtatggagtcttctcacattagggaaatgtagccgaaaacaatggacaagttcaacatgcagagttttaaactacttcccagacatgtctcagagtaacagagaaaagcaagccaccaaatcagccacaccatcacttaaacagcttctccttatagaaccggatctcctcaatactctcaagaatatcatccctagcgagatgaacctcccgcttaggcgggacctgctcaagcaattcatcactcccccatcttcgcgccgcctccttcaaggaactaacatctagtatgcgataatgcaggtgatccagcacctgcgagtacggcgtacaagcaaggaaagccttatcggcgtgaacactgttgcccgcgaggagggcagtgcgcgggaccgggacatgttggcggatgtaggcgaggagcgagtctgcggcggtggagggggaggtggtcgaggcccgcacggcagcggtgaggcccgtgcggccgtgtgtatcgatgcaccactgcgacatcgcgtcgagggcggagtctgggacgtggatgacggtttcaaagccggtcggttcgaggaggtttagttgggcgtctgtgatgaaacagcagatctggatgattttgtcggtttccgggttcaggcctgtcatcttgtgaatggggttagtggtgagaattttgaaatgcgctgtagcagggtttggatcggagatgggacgtttagacgtacctcgcagtcgatccagaccaaagggtctgtcgagcgttcgagtggcatcgtggatttgtagcggataggggctcttcctggctattgaagctgttagtgattcgaggttcaattggggcttggcagaatctctctgacttggtggagaaagccgggctggaccagaacaccgcggaatgcagatgcacgtagaaagatacttctgagcatggatgtgtagttgaggagtttgaaataggtagatttgtctcagctatagcctacggtttagaagcttatcggggtttaagccggtctagtaaatgcttgacaaacgcagtcagacggacaccggaaaccttttaaaatatacaatctacgatgtatacagtgacttctctcggcgtacaacgcctagttcagccttaaacccatgatcaagctgccctgatcggtgcagcaaatgtatttctccttcaacatgttccctgtattgtaagtagtggacataacggcgtaattgtagaaaagcaatatttatgaccatccagaagacccagtaaatccaacgaagatcccgcccactcgcagaatcctatctagatccataggacgcagcaaaaacgaccagtgctttccaaagcgaagagtagtagcctgtcaggcccaacggctcaagcgagatctcgacatcagatgtaacctattttcgacgatcacagaattacaactcctcatcatgttctgggggcccagcagaaagatcaggcgtaagactgaacccatcaccgaatatcttcggactggtgaaagttgattccgttggagcggaagagcctagagtttcattgattctaccggactctgcgatccggcgtctaagggcattctcatctgcggtcgagacactcccccgctgttttttcagtggactaccgaaaaggccatcttctggttcaacggctagcagagacggctcggtgaggtgcccacctgcagatccagctgcggcagcctttggcggtgtttctgagcgctgttttacaggaggcgtagatccagttccagaagccggcgtatcggcagagtcaccgacactgcctccaggtggttcggcggagtgctgacgcttgagctgtgatgtcgttagcagagaattcatagaatgttagaatgatacctactcgaatctttcgcaggctctccgccagctctccctggcgttgaatgtcatcgggagagaggaaccgatcgtcatccttggcttcttcgtcgtctgccttgccaagtatggggttgtcggtgtcgtcatcatcgctgtccatatcgtcgacgctcttctttcccttccgcggcttggcttcgctgtcccggaaattaaggaatccaacagagccaccaggtttgatagggccgaggtttgcaatatcagcttgtatggacttgcgcttgctggcagcaggcgtctcttgcactttggcatctttcaagatacccatcttttgcaattgacctatgttgatgtaaaattagcaaccattcccatcaagagcgatccaggcaatacttacgctcaccacggtacataaaagtgaaaacagcgtatggtttatcagacgggtcaataccagtaacagtctgcgtactaatggtctttgggtcgagtgactttggcttcgcgaaactcgtggtatggtcaacatcggcgtctcctccaccgctgttatcttgaccaccctcctcatcgtcgtgcgcatcaaattgcggggagtactcgccccgcttgatctctcccgatgccaaaacccggaacaaagcaaccttaatctggcccgccgtctcaggaattggatcatcgtcgtcagagtcggaggagaggtcatcatctgaaacatcctcgaggggcgacttctcgtcatttccgtatcgcataatactcttggacttggcgggatggttgtcctccatttccatgacggtcgggtcctcgtcagcggcgcgctttgcacggcgcttctccatcttctgtcgcctgcgttcaatcttggctgctgcatccttcccttccaggtccagtccgttaagccagcgctccagaccgacctcgcggaacaagaactcgcgctcggcaattcccccgccttcgctatccggaacgctgacccagcgtgaattcacccaggtctcttcccctcgtcgcagtagtgtagccacctcctccttttgtcttccgtcgaagtagatgtatgcagccacggtctcgttcgccgaatttgtcaagccctggtatggtgcgaccgtcccggctatttggcctgaatcaccggccaatttccctgccacttttggtttcggccaggggcaatctgctgtcggctttggggtcgagtacgggacatcttgctcggggtttaggagggtgacggaaatggcgaaggttgattgttccgctttgccggtcccagatttggggattttgggtggaggaacggggataaaacaacctatgcgcgaggctcgagaatggcgttgaatggaatattcggggatcgggccatcgggcgtgtgaatgctcacggcaagccctttgaagcagggcatggtgggaatgggttaagtggaatatgggtgttgcactgtggggagaagactccaataaagacgcagggccagatctgccccgcaactaagacagggatacttcaggcaaaaacacgaaaaaagtgacgccaaatggaggataggcaaacttctttcttagtagtttttttctcccctccctcgtggagttgaaagaataagctataggtgggaggcggtcaaggtagtgggtttccacttacccagcagcccacagcagttccttgagctccactgcagctgctggtatgtttgtttctgggtttcaaaatggagggtcacgatgacgggggggtcataaatatcctgaggagtggtttgaacacacgacaatatggcttccgggctcaaataagcacataagacgtcgaaatgcgaacagaggaatggaagtaagaaaagtagaagtgagctctctcaaggacaaaggtgaggggcggaagtggaccaaaacatgagcgttgccatccccgaactcccacgtgataatacctatcaagcctatagtagcctacagcatgcctacttctctagtcatcgatagtcgttgatggtctatcccatgactctacctggtgaaataccacgattcgcacctatttatctaccaaaaccatcccagtcatcgcaattataccaacattcaacttgtccaggtcatatctccacatcagctgatctcccagcaaccatggattctgcgaaaccgtgtggagcacattttcccttctttggggttatcccgccgatgggagtatataccctgcgaaatcttttatcttttctaatatctagagagggtcaagtctttaacaaatctcatttgcattgtttctcaattgaatattcaaagatcgggagctagatgcaacccggggaacaaaaaccgcaatcggaatcaatccgagtcatgttgaccagaccgatttacgactttccgtggtcagagaaaacactctgcctccgcgacaagataacatcctcgttagcactcgcaagatggtcaaacttgtagagaggttccagctcaacattttgacggaaaatgtagcgtctgaaccaatacggcagcgccttggtgacttgatacttcatgtggacccgagtagggactgcgaagatataatccagttcttcaagagtgcgctgcttggtttcgggaacccagaggaaaatcatgaccatggcagttacgttcagaccactgaattctaccgttagatatttggtgagaaacttgcaatatgggtagaaagacttacgcatagaaggcgaatgccccagtggcagtcattgcactcaacattttggggaacgtgattgagagcacggcagcccaacctaggcaggttgccacggcccaggacatgccaacctctgataccaatgttagttccagaaacaatattaagggaaaaggggaaccaaaagtgagaaacataccacgatgggaaagagggaatacctccgccgaataagtgaacggcacgggtccttcaccaggcgagtaaaatgcggcgaataggaagacaaagaaggcgatcgaagcgagatgacctgtaccctcgggggtccagaaacagaaagcagcgccaagcaaagtccatgccatctgcgggaaagtgaacaacaatagagtccgacggccatatgtatcgatggtccagatagcagggaaggcgaacacaaagttaaccaagccgaatccccaggaagcaaacaaagcctgtgtatcatttgcgccagcgttcttgaagacagtcgacgagtaaaaggcaacgatgttaataccgcacatctgctgagcgatcatgacaacaaacgaagcaagagtggcacggcgcacacgaggaatagtgaagagttcgacgaagcgggtaacatagttactattgccgattaggtccatctcgatcttgatctgggtatggatgtagtaaagatcacgggcggcctgcaaaggtgtgttacggagacggcatagggaccggtaggccttgtccatctcgccacgtcgaatgtaccagcgaggcgactctgggcagaagtaaacaccgaataggagagggatggctgggatgaaggccgatccgagctgcagacgccaggagattttacctgtatccttgacagcaaggttggcactaaatccgaggaaaataccaaaggcggtccagagctgccaggacatgaccaaaccaccgcggatgacagcaggagtattctcggcgcagaagattggaattgtcgaggccttcagacccattccaatacccaggaggagacggaccacaaacaactgtatccagttctgggtcaccgcagagccaatgggagtaaggacacagaagatagacgcgatgaagattgtaccgcgacggcctaggatccgattacaggggtcggagagccagcatccaagacaagcactagcgatgtatggagcagcattgacgataccaacgagccacaagttccgattggcgtgagcactcttctggggatcttctgaaataccaaaagcatcggggaatgacaggttagcaccattggagccagtctggtcccaacctctgtatttctgttagggatgtacctagtgtgtgtactgggggaatcacatactgcacggctgcaccaatagagcacaggacaatggtgaagtagagtgatctaggctggcgccatttgtgagccacttcgtcacgtagggcagtgagctctagctcagtcaagtctgccactgtctcgaactcggcagggtcacgcgcaacaagcgctccttttttcaactcaggtaggatgtttgtgacgttgtactcctcagcaaactcttccacgttgcggagtacctgagtcttggtcaagtcggccaaggggttcttgatcctggttgatgttggtacactgagagggaaaagagatatatgacaggagaatgaaatgagtgaactttacctagcggtaacattgttctgaaggtcaacttgctcaatgtatcccttctcggcgctgttttgatcattgctggaactattggaactgagatgagcattgcaaagaacataaggaagatccaaatcttaccgctggccagaatcgacctgagtgatgacctcttgaaccattttgacgattgcctggtcaagctgttgatagaaactaagaaagaaaccagagactgtggctgagctggctcttttgatggaaaaggggaacagatgaaggctgatagaggagggtgatggagaaaggatggtagaagggtgatggagaaagggtaatagaggaagggtgatagagagaaagagttggaaacccaaccaacgatttcagttaccagactagttcgtttgatagtgaatcaggctccagagacaaacaaaatcgtgaatggtgactattttattgaccttgggggaggggcaccttttatatccattgaatcttttctcagaccagtccatttgaaaaggtgcacaatatcattggctagaataaaagatgtcaaagcctcacgagtgaagctccaaggaacgactttctacttcccgaaacggaatgaatctggggatccgcatcggattgcccacggggaaactctaaagtctaagaaaaatggagacaaagccaataccccagacttggtctcggcaaaatactacattgaaagtgctctgctaccttggtgaacaaggctctcggcccaagcacaactacatgcagccaatgatcctccaggatttgtcgcttccgatcgggatttctgtccagaccggttcaaagtcgaaaattaaagtaagccttctaccgttaagccccaggtatattctctttcaattatgcggtacttgtctccatgttatgcaatcagatcttacaagcccatccataattcctgtcggatacagatatgaaaagtaattctcgcgaggtatcagggtcgccgctctcgatattggcgtctcagggcgagcgccacattcgcctctagacaggggccagaattgtgattggcgaaaaggatttaggcatatggctgagagccagtcattttttggcgctaaattaggcttaaaccacgttcgggcctgtttccggcgacttcacagggctaagatgttcacgtggtcggcatatttgcctttgagcccgcatcgagacccaagtcccctcggttataacgactataaaaaatgacgaacatttgaaattgagacattttccgaatccagtagagagagggagagggaaaaagtggaaatccggggcaatgcgggggatatactctaagggcagtctatcacctcggggatgaatttccctctcggagcccaaccacggtatgagggaaatatcggaaatggtactagggtttcatttaatcccgatccctagtcaagttatcccggtccccttcaagccgtgtgccccataagcgttagttactggcattaaaacaagtagccccagacacggcaattattccaacccgataagttagtcccggaacatggcgcgctgatcctaaagcggcacattgaaagatcatcgccatcatcactcaatttactgtgaccgcccccggcgatatctcgaggttcgagcgggccgcgtctagggttgcatcgtcaaggtgctcgtggctggccatgtggagatcaacgtgttttatctggggaaatattttgatatgcttcggtaacctctcaacgccccatgcgagtcatgacatcgatttgtggcaaaagaatactggctacatcctttcttgtccattttcggcttgtcctgcaccgttcaaagtattttgtgtttgacatgtcagatgcagaatgccccttggcatattagttaattctatgagccaaatcctaaactagctcttgatgggaagaatagcatggttacattgccgatcaggcgtccaagcgtagtatatgtaccatgtgccatgctagatcctgggccatgctatcccgtatagaagagcatctgtccttccagaaagggatcgcccttgcgggtgcctgcacaccctaccatgtaataaactgtcgaattgcatggccaatgcatccttaggagagcgtctgtgtgccctgctgcaaggagcaaagcaaatacagaaataagtctccaaaatttctccatcccattgttctcatctacaatactcgcaggtgggatgttatacccactttgcttcgtgcggaaaacagcttcaaaaagtcgaaaaatgtaagttaagagtaaagtaacaaggccaacataccacttttataaccgcccaaggtaggtcgatgcagtttttaaatgtgaaatcgtagtgtttgaaaagaaccgcttattcttcgacatcgaatcgggataagctagtaaccaaattgctttttcctgatggaagtgttgccttgagccaaacaaagaaaatgacagtaacattttcctccatgtaaatcgttggttcctgtacatgaataaaagcctagtcaacgagagctcaaaatgaattatctcaacaatgttgcttttgcagttcctcttggattgaatagcgcgaatctcgacatggtcagatgtatgttaccttagcaagattgcatatgttatatatatctgattatatctggcgatcgaacttttccttttccgatttactgcttctcgttgagtgagaaatgagctaggatttgtctctatcttccgataggccagttagaactcgcagcgattcgaaatgtctcgaggatggcctcgagctgatccgcgagagaaaagatggcaattgtgctgccgtgcatgcgtacaagcgcttggtaatcgaagcaagggtctaccatctttagtctcctcgcggagggagtttcaataatcgtaacagtcgtctctggagaagtgatctgaaatagacctacggccatctggcagattagatagaacttcccattcccctcaaagatccccctcccacatgtggatcaccatactttggtagcacagcatatttgaggttcatctactttgatacataatgaccagaactacatagaggtgtaatagattgaagccaaataaatatttaatgagacacagttgaatacttcgatattcagtcaaccagtgtgatatgacgtcatcttatctccgaggtcatccatgattgtggagagctgacaaattagaatctatgagcttcttataactacataagtactacttacttgcttccttaattattccagatgttctctcgttcactgaaagacttacctcgattatctcacttcgcgtccagatttcacccatattctactatgtcttcaaacattaccctatatacctggcccacgccgaatggcatcaaagcttccatcaccctcgaggagcttggtctagcttataaaactgaaggccttgatatctcctccaattcgaatccccaaaaggaagagtacaactacctctactacacaatacgacatgtcacataagctgatgaaagcccttgaacagatggttcctgaagatcaaccccaacggccgcatccccgccctactcgatggctcgcagcgcgtctttgagagcggagcaatcatgacatatctagtcgacaagtatgacaccgaccgcaagatcagttacgcccctggtacctcggagcacgtcgaacaaacatcctggttaatgttccagatgggtgggctcgggcctatgcaaggtgcgttcaaaatctcttgtacgtgtgtttcaggttctctctcacacccaataggacaagcgaaccatttccgtctcttcgccaatacgcgttccgattacgctatcaaccgttatatcaacgagacgaagcgcctcttctcggtcctcgaatcgcgtttgaaggaaagcccttacctcgcgggtgagaagtatactattgccgatattgcgagtttctcttgggttcgtggtgctcctgtttccttggagattgatctatctgaattccccgctttgaaaaagtgggtcgaggagattgataagcgtgctgctgttcaaaagggagtcgatgttcctcattcgactaggactcctgagcagagagctgaatttttccggaattgccgggccaagattgatgccatgaccacttctgatcagcattgattgatggtagtatattgggtttctggtcacagtgccgaaaaacaatagtacaaaggaacaagtcaagctcgttgcaacaatatcataacattccttgcatctaggagtgatcctatgtcaaaggtctgaattatacatcaattcctcgagtaaccaaattctgaacaataaacaaagaggcaatagcaattttgaatagtcaaagctccccgggcctgtagcttctccaggtcttgaacccaacctgctcataccacccgtcgagcgcaacccagtctacaaagacaccttcaatgcctcgctgcttcatgttttcaatagcatgacagatcaatgccagtccaatgccatgcttgcggtgtgattcatcaattcctacggcaccaatgagccctgtgtttggaccacagatttgggggaatgcccaagacttgttcaaagcatatgatggaccgagcattagtgtccaaccaacctgctggccgtgagagtcgaatgctatcatcacactgtcgggatacttgtcgggatgtaaagcgacgtatgcctccacccagctcttgataaaattttagtatgaattccaacaaagtacaagtggagagaaacacaggagtcttacactgtccttagagaagttttttctttggccaaccaaacaggcctcgtaatcttcgggttttaatggcgcgaagcggaagcctcgctcccgggcacgagtgatatacttctctggcgactggaagttccgaatatcttggtacaaatcaaccgaccgggcactgggagggctgagtcggaaaccacggtgagtgaagaaatgttgcactgtttctggaaggtcctggggtatcccgggccaaaagcgggggaatgagctgcccagcttcacattattgaagccaaaggttgcccggaagtatgctcttgtttcgtctagcaaggcaattccaatgccttgatgttggtactttggcgacacggcaagaactgcgatatacacggtgtttggtgcactatgggcatttgtataagcaagacagaagcctactagctgcgatccaaaacgcgcgatgaaatggtgaccatgcgggcgtactatcagagaccgcaaactttcagcgggaataaggtaggtcgggagagcagcggcccagacttcgaccacctcatccagatctctttgcgcatcaaatggcattactaccgcagaggtctttgtcgaagcattaatccccagcggaagagcacctgtcgggactaatgctccaaacatgatatcggcagccacagaaaatgcctcgatggtcggctcgtatgtggtaatataggtcttcacactaggagcatcaaggaagtcgtaagggttgcaaacagcaatatgcaccaatgcatgaacacgttcagcgagttccaagcctaatgactcctggtatggcgactctcttgcattgaatgaagtgaaaatcaccacatcagcgacttcaagggttcgccattgctccgaagtcaaaccggtcgctccgtatctgagctccgcaatggaattgttgtgttgccgcaagacatcaagatatctgttagactgatataatcctggcctccccgttccttcgccgtcaaccgcaccaccgactgggatattatctccagggaagaggaagatgatgattgaagtctttgatagggggagaatgccatttttgtcacgaacgagtgtggtcgatcgagaatatatatccatagtcgtctcggcaattctattgttgagcgagttcaagtctgcgagattagatttttgaagagcgacatcccagttcaaatacttgtccttcaccgtagcaacatggcgacaagcgtccgccagtcgtgactgctcgattctgccggactttattgcttcacaaactgccttgatcgatgctacctgcacatcaaaggtatgacagatcatgatgctatcgctgccagcgcgcaacgctaggaccgagccttcttctgtaccgtatgtagagcggattccatccatctccaggcagtctgtgatgatcataccatcataggccatgtccttgcgcaaaatccccataacatccggagaaagtgttgcaggccgcgtgagatcgatacagggcagcgagatatgagcagtcatgacggtctcgatgccttcagcgacagcccgcctaaatggaatcaattcgcaacgctccagctgatcccttgttttgggaatcaccggtagtccataatgcgagtccacagctgtgtctccatgacctggaaaatgcttcacactagggacgatgttttgctcccgcaaaccccgcgcggccgcactcgcaaaccggcccacaaattcagggtcatcaccaaagctgcgtacaccaacaactgggtttaagggctccgagttgatatcgcacaccggtgcatagttcatgttaatcccgaagaaactcaaagtttcccccgtggctttccccgcactgtaggcgcactccgggtcatgcgtggcgccgagtgccatggcgcctggtacttgagcagcgattggcggagatatgcgagtgaccaacccattctcctgatcgattccgatcaataatggtcgctcatgtccagccaatctggcttcattctgtaaagctagtgtcaaggcctgaagaagattagtcacgcgtcaagatacttggaacctcggatatcgcacctggagctgttctgaattctcaaaattgcgcgagaagagaacgatacctccaacgtggtagtcatgaatcaaaatcttgatttcgggacttggggtgcagccatagaaccccaccgcgaagagctgcgatcgtcagtgagattcacaaaacaggggtttcagagctcatatacctggccaacctgctttttaagatctgaagaaaccattctgggtttgttgattttatttggatggtctcatggattgcagatggtttaaacgggagtgacgttgaaaaggatcggagttgactcggtgtccacccgtgaacttgatgcaacattgcacctacacttgcgcttgaggatatttcagcttaacctcttagagtctagcgaaagccaattgcgattggaacatttgaatgtaacaacatctgatataaaagataaggcaagttcgatggatgcggggtaggtaacctccagggcttgataggagatatatatcttgcaagtgatatctcgtccaacttgaactaacacttgcacttccaaaatggctgaaattcatgaaaatggtaaaaaccccacatcggttcaggtggccgcctcacagccacattctaccttggaggagtatgaacagctctttggcgtcgacgaggacgcgtatgagcagccaaccaccactaggaaagaactatggtcctattatctctattacaatggcgataacggtgtcggtccgggatcgtacagtcaagctctgtatgtacaaatggcaacgctggaatttttcgactaatcccatgaagcttccagtgggccttgaacggtgccggacatcaacctggctcgaatccacctaaagcctgcaccgattcatcggcatgtgtagtgccgtgggcgggaggcacgagatcagtatcttccgtggttcttattgccaatggcctttgcttcactttcatgacagtgatattcgtctggctgggaagtgctgcagactacggaacattcggccgatggcttcttctggcattgacagtggtctgctgggcactgcagtatggtatgatgtccatccgacatccaagccagtggccaacggcgatggcattgtacgttgtttcatacattgcctacggcgcgacgctagtattctatgctgctgtatttccccgtctggcacggtatacgccgcatgtgcgcaaagcgagagaagaggatctcagagagggtaagatcaaccaggaagaatacgatacggttgaatcactggagagaaatcatatcaggtgagttgggaaactttgagctcctggccaagatgtcgctgacgatagtagcaacatttcaactgcacacagtaacattgggtacctattcacgctcgtgcttaatcttagcgtcctgcttccactccaaaacaacactttctcgaataacctggccctctgtcttaccaactcatgtaagctttctgagcagtcaatctagtgtgggatttatctaacgttctacagattgggtcgttcttggcatctggtggtttattttccagcaaaaaaggccaggtccaaaaataccaaaagggtcaagctacaccaccattggcttcaagcagatctggctggccattcgggaaattcggtctctcccacagacatttctgtactttttcgcctatttccttcttgccgatggcctaaacactactggtgggttcattccttctttgcttgctgcaacgagactctatagccccatgtggacaagggaattcactaatatgaattattaggtaccctcgtcagcatcatccaaaacgactccgtctcgttttctttcttgcagattacatatctcggcattacccaagcggcctgctcgatcacctcaacattcggcttttggtatatacaacagtacttcaaatttaagacaaagactatgttcttgttcacaaatttctttaccgttttgatccccttttggggcatgctaggactatggaccgatcgcatcgggtatcacaacagggtatgtatcaggccccaactgagagtctgcagctaacagccatggagtgggagttttacttctacaatatcatctttgggcttttccaggctccatactatgcggtaggtggaactttgaatggtcttcaacacaattcctgctcccatagcttctaatatcgtgccagtacgctcaaacgatgatcagcgaattgatgccacgcggctacgataatatgtttttcgcactttttggaataaccaatcgcgctgtaagtcggatgtcttgaatgttatatttccttcgaatcactaaccttctagtcttcaataatcggtcccaatgtcatccaagccatcataaacaatacccacaacaactggatgggcttcccatttttgtttgcaatctgcgctggggcaatgatcgctatctgctttgtagacatcaaaaagggtcgtgaggactgtcgagaattcaccgaaaagcgcaagatagatcgtgtcgtggcggagagtggtctagatcccgcttatatcgcaaaggggaagcaatcagctcgtaacgaagatgtccccgaagtgcaaaacgagctcgcaagcacttcggtgagggagtgagcgtgtgtattttgcgaacatttgagttgttattcttcagctctcttttagtctctgttttgatatgtcacatgctatcattaagtcttacatagatgtcatgtctccaacgagatattctaaatcgactcttcatgtctcagccttttttgtttcctgctgtatctccttggtgctctcctcgaccttacgctggtccctcttttcgaccttgtcccgccattgatcgccgaaaacagtcgtgagccatacaccgaccccggatacaatcaaaaatagggcgctgatggtactaaaccaccccactcccatgctctctatcgccggaagaacaagtccagaccccagagcaccgaacacgtaccgtgataggtagctaccggcaacgacttcagcactccggccgcttgactgcataacatccaggctgtaggtattgagactagggaagcagaacagctgcgccactccctggaagaacatcgcaagcacggggactggaattccaccaacagccttatcgaccgtccagccgtagatcaaaatacagccggggatgacgacacccaagaatatcagacaagatttaagtctgtcttcggggactcggacaccaccgcgcttgcgaatccatttcttcacagtgtggtctgcccaccttccacccatgagtgtgccaacaagataaccacagcctggagcgatgtaaaacagtcccgtctcgatagggctagtgaggtggaagcgtgggttgagtacatatcgaatcggagtcaacagagagtactggttccaaacgagagcgccggcagcgagacccgtgcagaagaggttggggtatttgaatagcatgatagcaacttggaggggagagatccggtgccaaaggtatttggctttttgccacgtcgtcttgtcggctatgtcgcctttagtcaaattcgggtaggtttcagggaaaaagaagaagacaagaagcgtgccgcagcctccaagagcagcctggagccagaagatcgctcgccatgagcgaaaggtgacaatcacgccctatattagtagatcagcggattgtctcggcgccggggttataagatagacatacgccaatgaatggtccaaaggctggcccaaccagggttcctgacaaaaaccaccccaacgctgttgcccgcgctcgaggttcgtatacatcacctaacgccgagctcccaactaccaagaaagatgttccttggaatgcagtcaagacgcggaaaatataatacgctgggaggttgggtgctagtgccgtgccgatgctaaacgcgaaaaataagaatgcgctcacaaggaaaacctagtcccaattagcatgttacttcaacatgaacatatgctcgttactcaccggacgtcgcccccaaacctgactaaagggcccccaaaagggagccgcaatgcccatgaatgccatatataacgcattgctcgcgtttatcacacttcctgtggtgttataggtcttggcaacttcaggtataccagctaagatagaggtagaagagataggtgccaggaaagagcagaaggaaaggatcccaacgataatgaccttgcgtgctggtgaaaagcgtagatattgctctgcgttgacctcctggaagtcatcgttgacaaccatatcatgatgtgaaacatggctttgtacgtgatcaagactattcacagctccttctcgctgtgagcgtcgggattgggatctctgaatttcggtttcattcgcccaggattgagaccgcctgtcctcgctggaagctttcgaggtagttggagacatggcaggaaccttttagcaagagcaagtgcgtgctagcttgtggtaaatcagatccgagtctatcgcagtgcagatgcaagatatgaaaaagaaatatttgcaatcgttcttaaattcggcttctttccgagatcatgctcgtcgggtagatccgtgaacgcagaacgtcttcaattgaaatagtaaaaagtgaagagatgaaagtgaatgaattgagtctaagcaagtcaacagcaacgagatatatcgcagacttaaagcgtgagtcagagaaatttgaatggctcttttccctatcatctggaaggatcggcgggttgcttccgatgtagcatttctagaggccagcggcccccgaacagagggcttgctatcatctctgggggtccattcttcccagtttagaggcgatagacgaatgtgattcggggagaagaccggcgggtttgttgagtagggcagaggggcggaaaagaatccgggggctacgggtgccggagatacggttaatccgtacggagtactagttgggcatggaagacgaagaaaaacacctaactatactataatgtatgttgtaaatcttttggggatcttataagctaatagatatttactagcttttttcaaattcaggctctcattcctcattcattttgttacctagtactgacccactacggctagtgagatgggagtctttcacatgtcgaacagatgctagtatataactacctacacgtaactaactacgtaattataaaataagtagttaactagttgactatttagttagttaactattgatcatttaataaaaaaactctttcaaaaggagtatctggaagaatgcctattctggtgttgtggctgttcagcccctgcccatgacgttatccccttctgaccgccaatgaccgactttgtccctctacctacctcccccacgctttttgcttttgtcctggagatttcgagcccaatttaatagcttgcgaattcattcttattccaaaatatgtctcctcagagtcaggtccctgctaatagcaagggctcatggacaagtttcctaaaggtatacaggctcattttgttcgagtatacctttgctaacaaatttccagtcgattgcctcctttaatggcgatctatcctcgctgaccgctcctcccttcatcctgtctactacctctctcaccgagtattccgcctactgggccgaacaccccgccctcttcgtggcaccagctaaggaggccgatcccgcgaagcgtgctctgctggttctcaagtggttcctcagcacactgcgccagcaatactgcagccgtagtgagaagctcggtagtgagaagaagcctttgaacccgttcctgggagagctgtttatcggcaaatgggtgggtgacgcggaagtaggggagactaccttgatcagtgaacaagtcaggtacgcgagaccacttttgtataaaactacaacccactgattgaatactagccaccatcctccggccacagcctacgctatctgcaacgaggcaaacggtgtcgaggtgagtggataaagattgtaccaagtcattgagatgttaataactgacagtacaaccacagctgcaaggatataacgcgcagaaggcctctttttctagtaccatcctcgtgaagcagattggccatgcgctgtacactctcaccaagcccggatccgacgataaggagcaatacctgatcacactacccaacctacacatcgaatcgctgatctacggctcgcccttcgtcgaattggagaagtcaaccaagattgtcagcagcactggctatgtcgctaagatcgactattctggtaagggctggctgagcggcaagaagaataccttcagcgcaagcttgttcaaggaaagcgagggcgagaagaagcctctttacactgtagagggccagtggtcggataagttcattatcaaggacgcccacaccaaagacgtcgtcgacacctggagttccaaggaggaccccgtcactccgctcaccctggctcccctcgagcatcaagatctgtacgagagccgacgtgcctggagcgaggtggccgccaacatccagaagggcgacatggatgccgtatctgggaacaagtcgcgcattgagaccgctcagcgcgaacagcgccgcctcgagaaggaggcaggccgcgagtgggagcgccgtttcttcagccgtattgaggagagtgccgaggacccccaaatccagcatcttgctaaagccatcgatcttcctttcgaggccgacaagactggcggtatctggcgcttcgatgctcagaaggctgctggcgctcagccgccttaccacaagattggcggcgagggtctcggtctcaccgagtagactattgctgggattggacaattctctgtcgccctctgaatttttcttgggacctagcttgcacaacatagatttgacgtttttggattcctattctgcaccgtgtcattttgcatttcgattgtatatagttcccggtccaggttgaagttgaagccgcgcacttgcttataagcttggacggctcaacttttccatataatgatatggtatcttgaaataattgatagtttacatctttgaacttggtgaaagttcatgtcgaggctgaatgctgcgtcaatgacgaacaactagtacctccgtgactacgagaaagctacaatgtacaatactagaacagtctctatatataggcgccacactggacagtacaggacatacataattcatgacacttttagcccagaacgcaactgggcattggatctacctctaccagacccgttcagccatacatcataatcatcgaccgatattgcacatggtgagggacaaagacagaacaacagaagggagaagtaggttaaaaaaaaaaaaactggaaaaccgtccgcggaaacaattgacacaccgtacccgaatagacaccgactaggttatagcgagaaaacaaaaaagaaaaacagagaaacctagagaggaattggtgaatttaatacagagaccgcatcagatgggagcagtggtagcaaagaaaagcaagacggctgagaggaatggcaaggaaacgagaaagaaaacaaataaacatcaagaagacaatcccccaaagtaaagaaaaccagccaagctcccccaaaaaaagagaagtagagattacacagatgttgaggagagaaagatgaaaagaaatcgtctgagttctgtctgtccttttgacaagacattagaggtttctgtccctgtaaagtggacaaagaaccaaaccccttttcaaatcatccgcaaatgcaacgccatatgtgtttggtgggtcattatgtctccccttcgtttctttttgtctttttagtggccgtagttgccaccccagccgccacggccagagttcgcatagtagttaccgaagcctgccccgtagttgttaccatagccagaggcctggtgagtctgggtggccgcaccctggtgaccgagtccaccgagtccaccgtactgcgggtttagctgagggtagctaccgaaggactgctgaccctgctgaccctggagcgggggaagaccagtctgtgcctggggctgacctgggacgctgttggtagcagatcccggacggttctgggcgagagaggggctaggaccaccggccttgggagcctcaaagcctttggtctcgtcggtggcaacagggggctgtccggcgatgggaggatttgggccgaagctgccctgggaacggctgaaaacatccgacatcccagtaccaaaggcattggcgccagtagcagactggttatcagactgctgggcggagccagtacggccgtagacagagtcgcggctgggcatggcctggctgaagctaccggtgtttgcgggggaagacgattgctggtcataagagaaagccccgtggggttggccgtacatgccacccttaccggcatagggaccatactggctaccatagccgtattgctggttatgctgctgttgctgctgcatgtagtgatcctcataccggcgagcatcatcgtacctcgggcggttaccgccaccgtattgctgctgctgctgttgctgctgctggcccatctggttcatgtaagaagcgtagtgggggttgttgtagtagttaggatattggtagccataggcgtgctgctgcgcactttggccaggcatatgctgagcagtgggagtctgctgggttgcaccgggaatggtgggattgggagtgttgtggccgctgttagtggcgtcaacagggccgtagcggttaggaggctgcgtggtggtaatctgagcctgggcctcagcacccgagacaccaaacccagctccggcgcgaggaccggcgggggcgtcctgggtctggccgtaagagccataggaagcgtagtaggggaaacgctgctgctcagcagcgtagaaaggagagtactcgctgccggtggtggcagtaggttgagcaggagcctggttggcgaatggctctgggatctgcggctgcggctggctcacctgttgggtgaagggatcgaatggcttctgctggggctcagagtaacgagcgaagtcggtaaaagagtcggcggaagcaccctgggggaccggaggcaaaccaggggcaggacgcccaacggcaccagactccattgagtggggtgcctgagtcgcgggtggaagagaggcacggggggcaacgggggagtgctgcgggggctgagcgcgggtctcggcctcctcgcggttttcatcgatgtcaatagcgtcaccgttcagtcccatgctaccgaattgaacagcagcacggtctactgcgtgattgccgggcataaccacagcctgctgctgttccatcacacggcgttgaaggcctggggtacggccctgtttggtagcgctgggagggtatgcagacgcggggaagcgggagggagtaggggcagctgcggccacagctgcgggatcaataccactgccaatggtgcttgcggcggtggcggtaggagcgggggcggatgcatcggggatttgttcgaggttcgtctcagtcaagtcgtcctgaggagggttaacggcggcggtcggaatggcggggatcacgggatgggtgggcttggcgacgggtgtcttctgtgaggtagcgggcgcagacacaggtgcgggagcgggggcggggggagatggctcggcgacaggctcggtgggcttctcggtgacgggaacaggaggagcggcttcgggcttcttttgcaccggaggagcgggtggtttggcaaaaagactcgcccaccccttctttgtgccctcagggatcacactgctcttaggctcgggcaagtccaattcgccttcagttgtgggctctgcataagtctcctctgccttaggcgtatcccactcggatgtgatagcaataatagcagaaggcgccggagtctctacagcagtggatactgcgcgagatccatttgtagtcgctcctgcacggcctccacgaccgccacggcctcggtctgcgcgaacacgtccacgaccctctattccaccgcgaccacgggttccacgagcagaagctgcagtcgtctcggtcgaggcactgggggcctccttgggcttaggacgagtccggtctgtggtcttcttcttgacctcaccccactgagatacattacctgtaaagccagtcagtcacggtcttcgaatcacaaggttcgattgatttcgagtcggggagattggggttgacgggaactcgaccttcactgatgcgctcaattgcctccaagagctcgccgttcgagtcttccagtgcaaataccagatcttcgtccttccagtctgggaacatttccctaagagttggcagagtgtcggagtacttcttcttcatctgtccaatttcaccctcttcaaaggatgagatgtctgaattatcatttgcagatctgtttccaccacgaccacctctggagctgaagccgccacggccaccacgggcggatactctaccccgcgaggcggaggaccggttctgaatatcggacatgttgattgatgaagatgtgtgagatggagaagtattgaggaaggaggtcacgattcgcagggaaaggctattgaaatggagcaccctcgcagaagaggaacagcaccagaaccacaggcacaagggccagaagagacaaaagaaagaggtaaaatcaaagagattaattgggggagagggagaatgcgttaggagatgacaagattgaagaaaggatcaaaagctaacgggatctgagttgcttcccttcaagtcttggcgttgcctggcttttagcgagtggcgcttattggatgctgggggggatttacagtaacaaagggatctttactggtttctttacattttgaacggaatctgattccgaataattatattggaagacatttatagatctagataattcgttgcattccattgaccgaatggaaataatttttgaaaattgtttcgtgtcagtgtggttggtttcttctactcgtcattcacctttttttcgctttgggcgacagaaggctagtttcaccgccctcgtcgatcctcctctttacctcgatgcacatcatccctcagaaccttgaaactcttaaaccatcatgaagggtacatccatttttcagttcaagtcctggcctaaaatccatcaacccttacctcgtactccacgagagtctcagcaactgttaaatgccctcacgtcttcttttcgtcgccaactagatggggcttatcccgcgtcaggcaacaaccatggccggcccctctccaaccctgaatcatcagcgcatgcaaccgatcagcatttgcagaatatcctcgacaatccgcttttccgtattactccgactaaacccatctcacgagaacccaccacattgcaaagcattgagggccagcgtcgactagccgaagagcccatggccgtatttgatcaaatggctgcagctggctcagtcactaccctcacaatcaatgattgtctgaagtctcaacttctactttccaggtccccggccgatatgaatacatctcgggttgcatcgaggatcgttgattggtattgggcatcagacggcacatcgaggcaaatgcttctgcgtttgcggtcagtcactacgtcgttgaccaagttcatggtggcagagggattacacagtactgttatgaagtggttgcagatgctcatgagccaggacctaggtagtcagaatggccggatgactgaagggctcgcgcggcagacgtttaatcatctccttgttgattttatagatgcagaattctgcttcggaaatggcttcaactcagcgatggcacattatctgagtgtatgccagatgcatttccaaagtacttcttcccataagtcaaggaagccgatgctcctggctgcaggcgcccacctgagccgtctggccatggagcataaaccatcgggggagcaggtatcaacactagtttatgatcagttcagagatacggtttctgtgctgtctcctcggtcattactgctcgcatctgtggctgtctgccacccaacagatcctgatccacgcccgttcctccaatttgtggagaacctctcaccaagcaaattccaggcctggaatgaaactaggcgtgatgctttctttgagattggttcagaggctctccgtgtcctcgttgaccgaaagaggttccgtgatatctcacggctagagcaacatatttcagaactgctaccggaacagccagcaactccagtcgctgagaagtcacacacatcgtctgaggaggaacatatcgcccgtctaaactggagctttacatgatctgctggtctcaaaacctatcgaacaatcactctactctcgcacaaagctaggtttcttgaaaaacattcaagccaccaacactcaggagacacacatatctctctatctttcaaccacaaaagaggtcaacttcagtgatgtcgtcacactgcaactcccctccgcatgtctgtgtactattacacaattgaattctttcagcatggatgtttgacgaaccttcattttccaaatcatcacgcaaaggaaatacactctcgcgactccactccgagtttgagcctcatattcttggcggtcgtacatacattgcttgccaaatcgtccgagagatttgagtcaccaggcagacttggctgaaccagtattttagaggtgtgtgatctgagatgcacctgaatactatcaattatctcaaaaatgcctcttcgttgtactaaatatacgaaatatcgaccttcctgtgatatatatataagccattgtcaatagtggctcagccggtttttagacaagctgtttgggctcaatgaagagcataacctaaacatccatacatcatctcctagctaatgataagatttacagcctttgtggtcgagtactaacctcgaacaaacccgtgctagtcacagtacgtcttgtggataacattgcgtggcaattgtaattctgcagctggtgaggctgtgcgacagaatgccgtggagagttggagggctggagcggcgaatcagccgagggctctccagtgctctaaatacgtcaccgcgcgacctcacctaacgatccccccaaattgatcgactcctctgtggttttttttctccttgtacaagctcacctgagcaagatttacagtcgcattgcttttgcgaatactctcccactcaatctttgccaacttataacccgctgtcgcggcatttgacatcaccgatctacaatggccgaaggagcccgcaatgcagattcaggtacgtggtttccatgcactactgctgaatccgaggagtaattggtctaagcagcccaattatttcctggaaatatggttgcaggacagtctttctttgtttagttaacgcccaggtgtaactatgccatatgctgactaagggatataatagatcgggacactgcccagctagtcaaagaacactcaggtgcattccagaacagagtaaacacaactcaaacggatagcccgcctattcctgaaacagcaaagcccgatatagataccgaccagttaaaggcagacgccgggctagagacacccgagcccgctccagaaactgagccatccgtgacagagcccgcaggatctgctctcggcaatattcctattgcccatgagtcgcaggttccagtaggacccacaaatgaaacagtgccgggcgaaaagcgtggcattgattcagctctggcggaagatgagcaacgaaagcctgaaccgtcggatgggcctgataccaagaaactgaagacagacgaagatcatgtcactggttctaatggtaccgccgctgctgcttccaatccagacaacaaagaacagaagaaggctggtcggtccaagaaggagaagatcaaggatgctgtgaacaagattgtcccaggagatggcgttggtagccggactcgcagccggaccaagggtgcttgaataaaccgaggtcactatatttacagattcgcgagtgacatccatgtcatcatatttgttccgactttgaatcatgactattcatgttcggcacttcctcattggtgtcactgtacacgtgctgcaataagatgaatattctttcctgaccgaaatttgggcggggaagttttcaaattcaaaaaccacagaagttctacgcaatatcttcttgatcatgtatgacgttttaagacaagcaactgtttcactccgtagtatggttgtagacatatgcgctgccttacaacttccgccctatcacttttactctctaatttgtcccaatgtttgtcccaatgtcaaaattcttcctggagtacaagttatattttcaaataatttcgaacgtttccctaaataacgttgaatccctaaaccctcccgggggtctctttcggaggtttgagttggtggccgataatcgggactgagtcatttctcggatcggaataactaaccctttctatccccgcttattactggaggggaaagtctgtgtcattattggtgatagagcattgatatttatttgattactttttccctttcatcatattcaattctctactttcaaaatggctggacaaaagatttggctgcgtgctgagaccaagcctgctgaggcccggtctgcctgtgagtagtctcagcccacctacaatggcggggaggcaattggctaatataccatccagtgaccccaaccacctgcaaggcattgattgatgctggatatgatgtgactgtcgagcggtcaactcagcgcatctttgacggtacgtccaatttcccatgtcccccatactcccaccatcccttgctattggactcaatgactgattccgctctatagatgaggagttctccaaggtatgattcactcagtaatagctcgaactcgccctaaatatcatcaattgttataggtcggcgcgcctttggttgaggaaggatcctgggttcaggatgcgcctaaggatgccatcattctgggtctcaaggagctgccggaggatgatttccctctggagcacgtccacgtcactttcgcacattgcttcaagcagcagggtggctgggagaatgtccttagccgttggtctcgcggcaagggcacattgcttgacctggaattcttgactgatgattccggacgccgagttgctggtaagactcttgtcccaaagtgttcttgtcttgactcaattgactaactcttgtttaatagccttcgggtggtctgcaggttacgcaggtacctatacttgaactccgtttcctgatacaatcaatactaagcgtggaacaggatctgctttggctgtgaagaactgggcttggcaattgacacaccccaacgaggccttgcctggcgaggttcactatgccaaccaagaccttctggtcgagtctgttaaggaggcgctcgaggccggcaagaaggtcgctggcaaagcacctaagatccttgtcatcggagctgtgagtcttgcacagatgcacagaaagcgatacacatattaacaatgctgtagctcggacgttgtggcagcggtgccgtgcagctggccaaggatgtcggtatccccgactccaacatcattgagtgggacatggcagagactgcgcgaggtgagtcaatgactattcaacatcttgaaatctggtctaagctcacaaattaatgtccacaggtggtcctttcaaggaaatctcacatgaagcggatatcttcgtgaactgcatctacctctcggccaagattccaggtaatattttacatacatccactcttcccgactcaattggctaatatccttttttcccattagccttcgtggacttggagtctctctctgcccccaaccgaaccctgtctgttatctgcgacgtcagcgccgacacgtaagttatcaaatccgaaactatgcaagcgagcgcacagctaatcctcagaagctccaaccctttgaaccccattcctttgtacaacattacgaccactttcgataagccgacagttcccgtctccggtctggaggctggaggtctccctctcagcgttatcagcattgatcacctcccgtctctgcttccgcgtgagagctctgagatgttcagcgaggctctcctgcctagccttcttacgctcaatgaccgcgccaacgctcgggtctggaagcaggctgagcagctcttccatgagaaggttgctaccctgcccaagtcgcttcaggtctaaacttgttgcgctggtaggtgtcgaataaatttacatgattgggtgcatcggatataaatacttacagataaggaatgctacaaaagttgtaagttcacacatgacagatgctgaagatattatccatcgttcattgttccgtcctataaggcagtagctctgcagtagctctatcaatgtgacaagctatggagtcaacttaaaaatggctattttaaatacttatcttattgttttccgggccaatcatctcctgcgttctcaaccgaatcgcttcgtggcggagatgacttgtctaaaagtttatatttcttctaagaggcataagccccgtatttccgatagttagagaggcattctgaaatccctgtcattccttgtcctccaggcaagacatggctttaccccagactacatggaaccgcggtcatcctcattatgtgcggggatgtgtgtaagacggatatccggagaatccgtccgtggggtctaagttctaacccacagaattgcctcattggatgaaatgagagcctcgcgcgaaaacgaagagaggaatgtcctcatgtccttcatcgttgaatcgtgacgatcgcggagtttgccccgtttgactgtggctaacctgatattggactccgggcgtggttctttctccgcataacgctccactctcaccctttctcccctcttccccgaacttattcgattctgccctcaaaattgatctgtcagcctttcaacctcggaagaccctgacccacattggaattctcttgtgatcaggtctcttaggacattcagcgctcttatctaactacatccgggctaattcgaggatggggtaatgagacgtctgcctgcttcgacacctacacgaaccgccgaacctctttccctctataccgcattgcttgatgcaagaaaagccgacaacagtcgccgcctatgcggccggggcatcgctcgctgccgttgctctgttctacgtcttcgggccgaattacacaattgacggagatgagtcaaacgacagcaatcgcaagaagagcatcgtgggcctgtctaatctggccaatgactgctttatcaattcggtgctgcaggcattagccgggctggggggcctgcgggtctacctgatccacgagttgcaccggcgccaactggacggaccggaaatataccatacactgcccagcgaggatgaggtttcgcggacgcgggcgcggtcggacaagttgcgggagttgcaacagggaataaccacacgagcattgaaggagatgctggaccgattgaacgagcggccgatctataagaaaacaatctcggcccgtgatttcatccaggctctggaatacgcgttccgcacgcgcatcagccgcaatcagcaggacgcgcaagaattcttgcagatcgttcttgagcgactctgtgatgagtaccatgctggtgcacgcgcacgtcaacgagcactgggtgccattggtgcagctgcttccagcacggcaggcgaagagggcagcccacaggaaagctcgtccgaggtggaggtgcgcatcgatgatggatcagccaatggactgcctgccatcatcgacacgaaactcaggaaaattgaccaggagtctgggttcccgttcgaaggcaaaatggagtcgcagatcgagtgccagttctgccattaccagtacaagccaaaccagacggctttcgtcaacctgacattacaagtgccacaaaagagctcgactacgctaaactcatgcttcgacggccttctcaagactgaatatattgaggatttccgctgcgaccgatgccgcctgcagcatgcggtggatgccaagaccaccgagctagcccgcgcccgaacacagggtgatcgagatcggttggtccaggagatttcgcgcctccgggaggctctggagatggaccctgaggctgagttggagggtatcgtattccctccctcagagaccgcccctaagcgcaggatcgcgcggcatatgcgcatcacagcgttcccaaaagttattgccatccacttgtcgcgatcgatttttgatcagagcagctcaagcaagaacgcggccaaggtctcgttcccggagcggctccccttaggaggcatattgagccagaaatggtacaaactgcttgcgattgtctgccacaaaggcagccaccatagcgggcactacgagtccttccgacggaatcatatctacccgcctttttcaacacctgaggtctttagctcctatgcacagagtcgcactgccagtcagaacccctccgcgacggccagtcctcggatagtaccacggggtagccccgatgccgacggcgacggaagcgtttcaggagcaggctcgtcgacgtcgctatctggaggatccgcgactcaactcacccctcctcaaccacggcctacaacctctggctcacgacgttctttccagagcaactcccgttcctccaaacagacgttgtccccgacctcggacagtaacagtccaacgacagatcagggtcactggagtccgtccgccccgcgtccctctcacagcataccccgctcttcccaggataaccccactggggtcagctcgcgacttcggcgccgtcgcaaaccgaatgatcgctggtggcgcatctccgacgaaaagatcaaggaatgtaagacctcggatgtgctgggcatgcagaaggaggtttacctcttgttctacgaaatggagaagcctgacgcgagcgctggcaagggactttgattgtcttcttttcttttttttagattccagtacatacatactcccatacttctgtacagatggggtggatcgaattaaaaggggatttgaatagagatatgtacagaatcagaccaagacatgtaggtagtggaaatagttagttccgataaacggcatgacctcgggatatagatgatgtcaccagactaagcttaactagttactccgtacccctctagtgttcttattctacattctacattattctaaatctcagatgaattaagaaaccagatatgttgtccaatgagattaactagaactcggaaccagattgaatcttgaaacatgattttagttagcatacacatgtacaaatagtaataggaaatggaaatgcagcgaatggcctcgaactcctcggccccgccacgaacaaaatacggattcttcgggcacttctggggatctgggtgagctattgtatagctgggatagctattgtagttgtaatagctgtagcaagggtttatgactgtggttatcaacaactttgaagcttaagcccatggatataggaacaatggcctcatcactcccgttctaagctcttgatagctcccgatccctcgacaacatcgggctatcacggggaaggtcgggaacaccagcgcaagagcccataaagtatattatatcatctgcccatctcttcttttccctctttttcctgaaatcacactgacctcactccagttccactaaatctccaccaccggtgagtctgccctgtctcccttcaccgatgacgcttgcccctccatcttttgcccctccttcttatttaactctgcccgctttcagctctcggtaagagcttggtttcactacatttaacgactttatcattggatatctgaccttctttccttctttcctccttcagatttctacgaatctttgtacaaacttcataatgggtgtccttgagcaacttaaccgcaagtccggcgtcattgtcggcgacgatgtcctccgtctcttcgagtacgctaagcagaagggcttcgccattcccgccatcgtgagtcccgaatgtgttctcctgaggaaccttgcactaattcaatctagaacgtcacctcctcctctactgttgtcgcttccctcgaggctgctcgtgacgacaaatgccctgttattctgcagatctcccagggtggtgctgcttacttcgccggtaagggtgtgagcaacgagggccagaaggcctccattgctggtgccgttgccgctgcccactacatccgtagcgtggcccccgcctacggcatccctgtcatccttcacaccgatcactgcgccaagaagctcctcccttggctcgatggcatgctcgatgccgatgaggcttacttcaagctgcacaacgagcccctcttctcctcccacatgattgatctctctgaggagcccgtcgactacaatattaacaccaccgccgcctaccttaagcgcgttgcccccatgaagcagtggctcgagatggtaagtagacttgagaaacgagggacaacattgacataatgctaaccacttttacaggagatcggtatcaccggtggtgaggaggacggtgttaacaacgaggatgttgacaacaactctctctacacccagcccgaggacatcctggccatccagaatactctcgctgccatcagcccctacttctccattgccgctggcttcggtaacgttcacggtgtctacaagcccggtaacgttaagctccaccccgagcttctctccaagcaccagaagtacgtcaaggagcagaccggttcttcctccgacaagcccgtcttcttcgtcttccacggcggctctggctcctccaaggaggagttcaaggaggccatcagctacggtgtcgtcaaggtcaacgtcgacactgacatgcagtacgcctacctgaccggtgtccgtgacttcgtcctcaagaacaaggactacctcatgtcgcaagtcggtaaccccgagggcgctgataagcccaacaagaagttcttcgatccccgcgtctgggttcgcgagggtgagaagaccatgagcaagcgtgtcaaggaggcccttgaggacttcaacactgctggccagctgtaaatgttgacctctgtgtgatgtcgcataaatgattcccttttttacctctttctattaccctcatattatcctctcttcatgcggccgaaaaagcgttgggcgtcctggggatgtgggcgtccaggttgtatgtagcgttgtattctgacacgctgtaatgaatgttcatattacggtttttatgatcgctctggaatacaaactgtaatgttctgcttgataattgtattccaagaccagccccgttgtaggtaccagccagaccgtaagtatacttcgatctatccatcatcaactccattatcgaattacacatgtaggttgttacattatatttcgtcatcagtacaataactatgtacttggtgtttttcttgtcctagttattgcattatatctcagtcctgataatccaagctctcggacacgaagtggtttactcgacgagcaaacgggcttctcacctctcatgtctgctacttgcttctgtcttattattgaagtgattgactaacaatctaattttctcatacctctcatacctcatctctcaaatgaacctccatcaatccccttctccactatgaaactcatcttgtcccaccatcatcataccagcattaccatgccatctacgcaattaacccaagtgccacaatcggtacatacaaccaaatccaagcatagcccttcctactaactaagctattactgaaccaggtcctagatctcagtggagatctagaagaactggtatacaccaaagcagcaattggaatctacgaccgaaccatgctggcaatcgtcaacccgacaacaacaccgatggagctcaatctccaccacgggtcctggctacaggccaagtcgaaagtggcatcgctccaccggagcatcgtggcggatttcaatcggctgccgcgtcaaatgaaacgtactttcgtgagggccaatcgcttgactttgtcggagcatgggtttcggccatctgcagataacttggagatcacccgtcctggtagtaggagggctatcgctttgctttaaaatggggagctgggttacatactagcattggcatgttggtggaaagaggattggctgtcaattgttgctaactggaatgttgtgctagagattcatcagcttgcacctctattcctgcccctttctaatgctccattttgactccatacaccaaaacatttggtatggacctcagctgctacaccattcatcgccatcccatactcagttagcaacgttagatgattccacactcaacaacatactatttcccatttcagcgcacaagaatgctactagggcaagttgttctgctatagagattgtgctctggctctatgtctatggagggaggtgatagctgtccatatctcttttgatttgcgttgggatgctcgaatgctttcactgctgatggatggctcaaagatgcattcaaaagcaaattgatactcagaattaagatttcacaaacacattgcagcggttcctgtactatgtaggttcttttgattcacctatcaatgtattgtaatcctgtacaaattatctacgcgaaaagtgtgatgtagcaatagtgaggaaattgactggtagagcaatggttgatggccatatttctgctgtagtgaggatgaccgttcaaatctgtcgagatgctcgtgtatgaaagggatggtggactgaaaagacaattcactatgtaaggctaacatctatctacaggaactactgtcttcttctaacagagcagacccaaaaagggataatggataaaacactcagttgatgacatggccaagtaacacactataaatcaaagcagtgatgatcagatctagcattgatgaatttacaagaataacatgatagcgtttcagtcgtaacggtgtgagtctcagatagtgacaactcaatctatggtccggacaagattccatgcaacatcttacgcgctcagttccgagacggcagcatatatgagttcctgacataagatatctttttgaaagagcacccaacccaatcctcaaatcagagcacagcaatactatcaacaagcgtgtttacgagtccactcccgcgcaatctcctcatagcgtgaccggtcgtttttgtattgctccgcgatccgcccctcgacagcgtcgtcaggcatcggctcagatagtagctgccgggcgaattgaagaactgcggcgatcttcgagctgggtttccattcgtcggctcggagcatgcctaggcacatgcttcctttttcgtcgtttgttacgttcgggtggtatattctcgttgcgaaggagacagtcggcggcttgaaggggtattccgtgggtagggagagcttgactaggaatttgccattctgtattgtttgccgagaggttagaaacactgtttattggacatgaactgtgaggttcgagttcggggactcttaatggagaccttggagatgatgggggtaaatggggctagactatggtttgacttacctgatatggtgagccttcaggcccttccatgatgaccttccactcgtacacgttcgactcatcggccagttcaaccctgatcccttccgggggggattcggtgagctcagtcagctcctatgaaggtagtcagcacactggtagatgagatgatcatgtggaaatataggtacttgccttggatatgcgcttgacgctgcccattatggtgttcggttgtggatttggcggggtgataaacaggagcggggaggttgaagaatgcagggaaacgcctaagcgcaagacgcgtttaaatgttgaagcaacaaataaatagagatctactaaataatatggaaaagatgctatgtgcaaaaagatgcttaaaggacaaagggggattttacggtgaagctagaagctccaagtggggtgcgcggcaaaagacgtcagtggagaagtttgatatgtcggccgctctatcgatgtccagaatagtaaacactataattgaacacccattgtctattgataactccctgccgtaacatttgatgcatttgattacattcttggcattatccaatgtatattttcgcccattactctctctgaatcatcaccatcagtcccattagtcccagcatgactgtcttgagccaggggtgctcgctgagcatgatagtaacgtatccgaccataggtacgtagccacgaacactgccgacaatatcatcggtccggtgaagataatcctggcctaaccttgtcagtaaccttcagagatggccccgaatcttgtatcgcttaccatcagcatacagctcagtatcgtctgccaaattgttatcaccctaacgatctgttagcaatttcctaggccattcgaattgtcgagtcatttaccttggtgagaagcatatgcgagttaggctttgtgtccctagaacttcgttagcataaggaagtagccacaagaaaaattgccgggcaatgatcgaggacatacactgtgatttctttcaccttctttgcactcgcccgtccttctacctcagggaaagtgcgaacaaccctgtggacaatcggaatagactttccccgaacattataaacgagaacttctccgatctccgcccttgtgtttcggttccagagaaagagcaagtccccacgctgaaatgcgggctccattgatcctgtggaaagggaatgtgagctgtgttcagaccgccataaaaatagctttatttaccggacagaaccacaactattggagaacttgatgcggacacaactgaaaggcctttccacagcatgaaagccgtggaaagaacaagcgcaaagttcagcacttgtgcaattgattgccgagcatttgtgatgctggatgagagggaggatagcatggtgggcggttcgcggtcaacggagatgggagggttagggtaggtcgctctaatagtgactgttcttagtcagaaacggtagggagtttatttcctttgttttcctcatggtagatgaagacggtacctattgtgttcagctaactaagctggttgggtcgtgttttgatagagctagagggtgcggagatgtggcctcgtcggagatcgccttggcgcagatccactggccttccgccttgcaggtatgtataaccatcgtgtaaattgtacggagtaccacacctgagttcatacaatggatttcagctggtccagaaatagttaatattgtaccgaaatgaagcaatattgttagtaagaaatggctgcttgctatatccgtttcaggctctatctaggcaactctgtaactatatataactaatcatattcgagatatacatgtttttcgcggtctatatccttaatctcttgtccactcaaagacagtatttgttatgttaaatctaggcaatgatatacaaatcctaggctcttgcagatcatacaagaccctccggacatcctcggacatcatcggtcagtgcttgtttcattgtctgagatatggccacagctcgtttgatattccttatagaaaataatacatagcttgacatcataagcagattctttttgtctatttttctctgatttttccaagagtttcaccttttgggctgcgcgaaaagtcactatgaagaatgttgaagataggcatccctagaaatcaagtcactagactatgtctcatggctgaaattgtggtcattctccgcattatacaatggccaattacatacatggtagtgatgtttgaggtatagacttgatttcaaacatgtagcctgatctacctaccatgtcttagctaacctatcagcagatggaaatctggtagattataggtaaaattcctggagatattttaggtgattgacgcgcgcgtatctatcgccgactgatctctaaagaccccattgtgcatattgcaaggggtttcattcttcggggcaaggtttgcataaaaatgtccgagcagaagcattttcaagatgataaaagctcgaatcccacttttagattagctttcacacaggactgatgtactgcaaacaagggtgaccaagtcacacattattcattatcatttctatggtttgcttcaatatgcagtctatctcctcagaatcgactttatcgacaggcgagcccaaagcttcagccattgagctcctgcatgaccattatcttgagcttacccccgatgggaaatatgtgcgatggttgcgagatcacccaaggcatcctcgaaattggtctagcctacgaaagacttacgatattgtccttatctgtctcttggatctatttatgtatgaccagactaaatctcaatgttattttgtcaataagctaacaatactactagaacagcatccagtaccgcaggtgtgagtccataaagctatctatgacctaccttattgccgagctaaccgtaatattttctagtcagcagctgccgcagaagccaaacatgaataccatatcagcgaaacgctttcgatctttatatttgtcacaatgtgagatcagttggtcttagtctactttgcgtacctgacattaagcagatttcttctcggccaggtggtaggcaccatcttatttcccccgtggtcggagacatttgggcgcaaaaacatgtatattgtgagcagtggtctcagcgccatttgctgtatgataatcggactcgtccgttcaatgccggtcattatcatcatgcgcatcgtcgccgggcttctttccgcgatcccttataccatcatcggcggcagcatcgaggacatgttcaactcgcatgctcgaatatggaccatgtactattggacaattgcttcaaatattgggctcattcttggacccattatgagcagctatattattgcaggccttgattggtatgtagcacttaaccatggtctatgtcaatttctcacaactccccaggcgatggaacttctatatcttcgccatcattattactgcaattacgggtggtctctgctttattcgcgaatcacgaccttccttgttgctggcctccgaagtgaaacgggtcaccgatatgactgtgcaacatattccaccgccactcaaccacgaccatatcccggatctcaatacgtttttaaaagaagccctatttcgtccagcccagctgtttttccaagagcctatcattttcgtcatcgcaatgatgatctccatcgccatgtccctcatctacatcttcactgaagccctccaacccatctacgagtcaatgggatttgcaaaaaccgacgcttcactgatattcgttgctatcggcctgggaacttgcctcagcacattgacccgtgtgttagacagctacattctcaactatttccgcaggcagggacgcccaattaagccagaatataagcttgtcgggctaggacttggtggtccattcttggcgattggtctatggtggttcgcttggactattccacctgggacccaaactccatggattgtgcccacactttccctcgctctggtaggctatgcgctgacggaaatggataccgtgctgtacggctatatctccgatgcttatctgagttactcggccagtgctaccgctgctgttgcattcatgcgagcgttgctgtcgggtgtctttccgctgttcacgacgcagatgtttaaccggttggggaataatcttgctatgtctgtgcttgccgctgtggcaactgcattttgtatagtaccgcctgtgtttatcttttatggagagcggattcgtcgggcgagcaagtttgctcgatatagctgggaaattcaggaggagctgggtaaagaaaaagaagattggtaagcttgggctttagttactatctgccgcttactcctaagaatacgacttcagctctagcgaccaaaatacccgcagaaaggcctttcgacaatgtcaactgaatgatctagccgcctaaaaccgaatttgcggcccctcatttgcctagtatattctaactagtagtcagaaaatacctcgtcataactaaatgaagtatgataggacttcctaagagctctcggacattttgtgctaccaataatgtgattggtgagataaaaacagaccctaggagctcaagcaccgagcgatctttctttcggcaaaagttgatgttaagcaatgaaaaaagtaggacataagagagaaaaccgggaagaaatgagaaaaacagcaagagatacctccgcatagccctgattgatgtagtcattttgcatgagccagtcataggcagacgaagcgaggagtttaagaacaaacttgttggcacatagcttccaaggactgcacgccgatgataatatccccttcgtgttgatttcggggtctgcggaagatgctttcaaagttgagcaccaaaggtgtaccatggatttgcccatatcggtacgtaactctctgtgttggtcggaaagaggtatccatgtgatttcgggtcttatacggatttggggaaggtccttcggaccatacctccacgtctactcgccatgttggcttgcgagtagtggcgatgataactcttggagcgagagagaagtatgaagaaggttagattctctacaacgatcgagatctagctaaatagctaggtgaagcctgacaaaccagacatcggcatgtgatcggcacgtgaccaccacaacaataacgacgcacttggtgagatgttcagagttgctataccaccaatgggcgtccttgcattgctgggagtaggattctgatacgccgacttcaagggcaagggtaggtaatcccgccccccttccccccacccatcccatcaaagatatcggatggagagagccaccagtcaggctccttagccacagactttccttgagttcttggcgatgggcgggatacgaacgccccattgtcataggaaaggcccattaagaatagctggatcaatttgagagaaaacgccaatgattgaattgtgtttctcaagggaacattctacaaagcatttgagatacagactataaggaccagaccaacaaaaggtaaacatcataataacttctgaacataagtaaggagatatatcaacataaaatgcacctatgccccttcagcggtcttaatggtggtatcctctctccgagtcagactcgattcccaatacttctctttcttgcctcgactaacgatcagtccatagatatcaaatggatcgacaaaagtctggagccaatgacggggatcatcatagccagggccctcaatctcggtgacgccatcttcagcgagataaatcttgtttgatcgcggaagccagcgcatgggatgaaagacattcagcaaagtggtattgctatacatgagcacaacctcaaagatccaaaagtaccattcctgtttcaatacaggactgatattctcgaggtcagtgtaggcattcagactcgcggcagtaaagtattccactgtgcgatagatggtacgaatcgtgatgagggtacaactgcagtataacaccagtagcgcatgcttgatcttgtggttcaatacgcctcctcgggcgcagttgaagtggaatcggcccgccaaggccacaaagcctgtcattaggacgatttgcatgataagcgccgccttcagtagcgccttgcctatgttttgcgagctaacactagagtttgaacttgcgactcgggccgctccgtttgcggtaatgctctcgatggccacacctagggctatgaaggttgtgaatacgcggcccggatggattggggagtggtatgggatgtagtagagtatgcggcccaaaatgaagaagttagcaccctcatatactggtctagaataatcgaagattggttgtcagtagcgtatcccattatgggctggatactccttacggtccggcgagcagaagcacagtgcttgctatatagacgcctatatttccccattgcccgaacgctccaatagtccgcgtgataaaacctcccgtaaacagaagggcagaccatggaagaagtccggtgactttccaggacttatatttgctgggggatctggttaatttggagtttcataatgggtaggggtcacatacaaggattgatatgcatggatgccgccagagatagcgaagagaatcgcaaaggcaattgcagcgcctttgttaggtgcatagaaccacaagcttccctcctctttttttgtcagataaactatcaatcgtgattgacttgggcgactcacgataagatgaccttggttcgagcatagttgttgtagatctatatattgcttggtgcgaacgatcgatttgcgtaaaaacaccgcactgtgtagttgatgtaattgatggtaagttggagaatatgagtatgctcagactaattcaccacactatgtaggtaggggacgttagacacatatatatacaacaactgtatgggcactgttcactttaggtaagttcgtattccttcaaaagcctcatgaactttattttggctacatggctcctcaaatttcctgaatttacgaataatacggagtagtcacagccaatctatgcttgggcctaaaatgacttcgtatttgcctctgcgctatgctcctaatacgaggctcactgccacagatcttcgacttatgattcgccaactttatcacgctaatccaacctaagtaatctcgttttcgcttgcttgcagtgcatgggataggccttcagcgtcatcaatttagttcagctcctaacatatacatagtattccgtagagaggttgataaaaatgggcatgtaaaaatgggcatgtaaaaatggaatagctttgaagcaagagggccgggaagatgtcctgtcgtggaatcatatggctaccgcagtctatcaccaccagtactccactaggtttacctgtacattttgtaatatgattaaacgctgaaactgtactgatatgcgtgacgagaggccactgttgtccgattcattctttcccgcatacatagttgcacgtgatcttgctgttgtcggggtgactgatagcccaaagcggtaagcgcgatgttgatctgtggatgttctggactttccagtttgatcgcgcgacccgcacaccttcgaaggtcaacgtcacctgcgtgttgtctagatactcacgagccgcccaaaatgccgccaaaacagccccagacatcgctgttccaagtttaccttcggttacgccccccgatgaccccaaaccccaatgaatgtgaccgctttttgaacgttgaggcgccagaggcttcgcaggaggaaacagagatcgtctcgcctgcatcaacacatgttactcttcaaccaccaaatgacacgagaaagcgcgccgtcgagaggtttggtttcacaaaggtcttcgaggagaccgcctcgcaactggatgtcttccatgacactgggatggagcccatcatacgtggagtactgaaggagaaccgagatggcctagtggctaccctgggagtcacaggcagtggaaaggtctagtcccgtgtattgtaatatcgcgataaccaagctaacgggttgatcatacacagagccacaccattttaggatccaagacccaacggggaatgacccaaatggcacttgacgttatcttccgctctttagagtcgacaaataagaccgatcatggtagcattacccccgtgatgcttgcctcgctggctgtcgcggacgcttctgaagcccaattgttctccgcccaaacatttctggaagctgtatatggcgaaccaaacggacgtacatcgagagcgcaaacaccgatgagcccatctcgcgccaatacccctttgacggtacgaaacccctttacgctgaactccccccaaggatccccaaccccacgaccaagcacccctggatcgtttctcccaagaccgagatctaaatctggaagcccccacaagatggatttgtctcatattaccagtccccatgacgctgctggatctggccttggccagatctcaactgagccctctggatggatcaccccaggattttctaatcctatcccctacacccactgcaatctatttgagcccaaatcagctaaatctcgactttatgtcttcaaggaacccacgcctgccttgaactttcctcgccgtcacatacgtgaacgaccatgcgcccttcctaggctgcccgatatgagccacctaactgtagatatggactcaaatgccgactatgtcgttttggtgtcaatgtacgaagtatacaatgaccggatctttgatcttctgtctccatcaattgcctcgggtcagggtaacatgtcccgcggaaataaccaaaaggatcggcgacgtcccttgctcttcaagtctaccgagggctcaccagatcggaaactggttgccgggctacgcaaaattgcttgcagcagctatgaggaagcactggccattttggatgttggtttaactgaacgcaaggtaactggcactggaatgaatagcgttagctctcgaagccatggcttcttttccctggaagtcaagaaacggacatactcaaagcgaactggtgaacaaaactgggctggaaacgccctcacggttgtggatctcgctggtaagtagattacattcttactgtaagtctgtaactaatcaatctaggctccgagcgtgcgagaacagcaaagacagctggtgccacacttgctgaggccggcaagattaacgaaagtttgatgtacctcggccaatgcctgcagatgcaaagcaacatacaggatggaatgaaggtatgtttggaactcatagttagtgtgctctttttggcagctgctaacctacaaagaccgctctcgttccttacagacagtgcaaattgaccgagcttttgttttcgaattcatttccatcatctcaccagatgtccagaggccaatatccccagaaggctatcatgatcgtcaccgctgaccctgtgggtgatttcaacgccacctcccaaattttgcgttactccgcattggctcgtgaggttacggttcctagaattccctcgatctgtgaatctattctgtctgccgcttctggcagtcaccgctcaatcagtgggtccacttcgccaaattttgattcagccgaagagctcgagagagctgctgctgagatcacacgcctcacacgcgattgtcacggccttgctgtcaagctagccgaagaagagattgcacgggctgatgttgagatgagattaagcgctgccgaagaaagatgtcttatgatcgagcaagatgtgcgagaagaatgctgggcagagatggatgagaaaatggaagaggaaaggcgacgctggcagagagcatgggatgagcaggttcgtagccgtggatcagctcaaaacttgcaaaatgctaataaacccagatcggtcgcaatgacgagcacatcgacaagaaggttgagcttgtatcccgcggatttcaaagtaagtctgccattgaggagcgaaatatgataactcttaaactgacctttctctccagtctttgaggattcggcgtcgaacgaacgagtggaagagcttgagcaagaaaacgaccagcttcgccgcaaactcgccgcttttgagcgtgagatgcacaaccaatccccgacaagaaagaatagacccaagaatgccacgtccgcgcggtctaatcccctcggccgcggtagcgacgttgaaaacgctttgcaacgcatggatcaattgaagcttgcagataccatgtttgctcctccatcgccaggatcctcgcctatcaagaagacgaggaagatgggaactcggaaatgggacctcgccccagaggaccagatctaagctgccttatcctctactccgccatgactgttacgatttattcttcttgtgctttgagatactcaagcttttaattcctatgtttattttggttaatacggaatgatatcccttggctaaggcgtttggggcaatcgatcctttgtttaataaatgttcatatttcatttccacaatcccagatttggattttgcgaatattgtacagggtagctcgtaagccattcaagccacctgtctcttaacgccatcctataggtcaaatagatcctgccctgggaagaacaccccatgtgctccataaaccggaaagaaaaaaagaaagcaagcccactcctggattgtaaagcagattcctcaggactcagaggatgtaatgtccatggcatcttgtttcccggtatctcgcttgtcggcgacatgctcaatctcagtatcattggcagattgatcgggagtgtggatctctctcttctctttgtgttcttcctccaactttgttccatcatcctgcatgtcctcatcctcgtccctatcaccctccccttcttcgccttcattctcatgaccaccctcatcgtcctcgccgtcaccttcatccgcaccttcatcaccggtccccgcctcctctgcatcagtgacatgagggaaaagcgccgaggtcccctcatcacctagcttcgtgtcctcattatcgctcagctcagtctcgtcagcactgccatgctcatctctttgctcaaccgagtcatccccagtaacagaaatctgcttggctgagccacgagacgccgaactcggcccggcagcagtatgcccaacaccctgcggagtcgcaggtggctccgtctcgcccgcagcaattattttactcgccacggcccggggagccagcttcgtgttcacgattgtgtcggcgcgtttttggatgtcgcggcgggcgattccctttgtccggccgcgtggtgccgggttatcggatactggaatgaatgttggagcagttgaggtctcgggaaggccgtcgcctagcgtgagaacgtggtcgactttcatcttttctttattttcctcggttggttgttcgaccaggtggggcgtgttgatttcgtagagtcgggcgtagaggtcggcgatcaggtcttcgaacatggtgattttcatgaggttgttgttgagcttctttagctctaggacatctcggagcagttccaagatggcctggctctctggccccagttgaggtaggctttccaagcgagctgtcttggtagagaactcttcccatccgattggtttgaatacgctttcttcgtgaccttcattgattttggctgcgcggcggatgatctttgcgtaagttagacaaatgtcttcccacagcttggtgtggttgaagaaatcgccttgcttctttctcacacggcgcaaaagttgatctaagcttgcacgatcgtcaagctggtcaagcaggccaacaaaaaagtacacgtagcgggtcgtgtaaacgaaatgtcgacccggacgttcaaattccggccgccagacctggatcgtaagtgtcttggtgaatatttgggaaagttcctgcttggcagcaatggcagcggtcgcgttttgctggtcgtcgtaaatgatatgcgcagcctatggattgtaagcagtatgaacaaaaaaagatcaaggtgcgggtgatatacctttacacccatacgatgatgccagttagacttgtcagcgctcttgtacttccgaaggacttcgagtatgtatgtgttccaaccctccatattctcaggggggtcgatcttacgggcccagggagttgcaaggaggatcttgcttccttcggtgggctgatattgctattagaatgggtccttcatatcaggagcgatacaacttaccgtcatgtttcctcgacgaacaagtttgtgcacaaaagagaagagtttgaaatgtggctcaaagataggatcagagcgtgagtctcttcgctgcggaagtgcagcaatggcatcgagaatagcatttatcacctcttttacttcgaccttttttggggtcgttctcaaggaatcatcgctggtgaacattttccaaagacatttgccaagcgtgtagtgagtcctattgagtgttagtactctttctaatgtccccgctctgtaaagtcccgttgaaaccacttacatccatcgcttagacttgtcaacagctgcccgtttgagaaggttgctagcaaaattccacgtggaataagctgacatctccttaaaaggcgttcccttgtacatttgttggctcacctcgctgctgtaatgacgagggaagtctacaacactgaagacccccatggacagcggctcgcgagaggatgagtagaggcggataccaaagtcagagtaaagatctgacatcgcttctctagtctctgccgttggctctgcagtcctcattgctgttgaaacagccatggcataacaatgaatagcatttcgctgcagtgctgccaagtccgaccggttgttattaatcttatcagctgtccatgtaatgtcttcatcaagctttgagtcataggtttgggcaagcctataccaggtttcccatctgtctgttccatgatccagatcttgtctgaagaacccgatggcgtcatcaagctcgcttgttggaccagggctgagacgtttctgggatcggaatttggtgagtgcggcatggccgagaaggaagaaccaccccttcgaagcgatcttcgcgttctctgtaggaactatcgtcgtcgaaagctctgtaataccctgaacagcacggagaagattggatgggttgattggagctttaagatatacattcacaaggcgacgattgaaagtcaactgaggtgtctgtgaagaagccttagcggggccaatcgcttgctgcatcttctcgatggtagtcttcaattcagacttgaacaagtccttcatattcatcttgttggcttgttgcagaacaaagtcgatcatcatgatcgctgtagggcgatctaatttctccggaggacatccatgatccacagtcccatcgaatgcagagaatttgataccgtgtaggtcgagaagtatttgacagacatcaaattcataatcacccttggtttcaaggccaaagagttccgatttcagaagtttcaagaacttcttttgcgaatatctgcacatcgatcgaacgcccaatgcattatggacggaacgaagaaaatggatgcggtcttcaagcggatcattgaaaagctccttgttttgagcaatcgcttccataaagagggtatattgtaagatccagcatcgaacatacagctctcgcattttttctttcatgttttctagcgatttcgccaacgagcctcggaagtcgcgaccggaaatctgccctactcgcaccgagtcctcgtaaaggataaagctatgtagaagcctcacgaggcgggctatagcagatattgaggtttgtaaatgctccatgtcgaaacagtcaaatgcttgttccgaatcttcgagaataagcagtatagccttggccacaatgccatcgagggctttcagccagcccaacagagctacttgacgatgttggcttgtttcctcaccgtgtttcgctgcctcaagttctgccattatcacttcgatgcttcgtaaatagcaagagacaactttaggagggtagtcaatggcttggtatgcctcctggagtcggcgccagaggaatagtcgcaatgtagcatctcctctatcgaggaaggcagccatctcagcgagatgtgaggtaggatggttcatgtcactctcggttggcatttcagcatactcgatcgacgagggctcaagaattggctctattgcttcgatgagagtcacgggatcctcagagtctgagttgaataccttggcgaaaaagtccatgcacttgagcttcaagacctcctggtctatcacagcagcggacaattctgacatcgtagcattatttatgagagtgacacttgggtctccaagggactgaagtatctgcttcaggtcttggagacagagcaagatatgttctcgctgtgcgtccccggcaagattgacatgaaatgccgatgcccacaaatggcgcaaagtgaggtttgattgggattcgccggatgggctgtggttgataaaatgatctatggatgaccgggctaacataccccagcgggccagccgatcacgctgtgcgagttttgtttcttggtctgtctcactgccaatattctcaactgaagcaaaaacatctagatgaagctcgtagatggtttgtatcatctcgaattcaaagaggtctttagccttatactcaaatggagctctatcgcttgagccaagaattcgagcttcaagattcgcaatcagttcgctgcacgcccggtaggtaaattcatcctcccgaactagaatctctaccactgtcttctttagaccctttggccacaaaaaattgacgtaagtcgactttgccgtcgaccagttcgaagtctcttggccgaagtccggcatgagaagacactttagccattcgaacaaagtttcatgggaatgtagccagtcagagttgatagcattggaaaaattataaagttgctccccggaaggaagctcttcctcgataactggcttccaagcaccttttcttgagtgttcaaggaaaacagccaatcccgacttgcttgtgccacggatgtccttcagcggagataaatcgtctttctgctgcatcaatcgagacttttcgtcatcccatgtcttcatgagccctcggagatcccgaaacaatcgcgtctcaatatcttggggtgtatcgcttgagtcattcgcagagcacttttctcttaggtcttcaacgctaccgagtacatcgataccgatcttcgagaagagggagtcgacagtgctaaacatccaatcatcggcattgacaaaaacctcgagacggtcttcgtaatacttgtcttgatcgaatgcaacttcttcaggtggtagagtgtcggcatttgactctcgggctcgggtccgtctgcttttcatgcggccgccctccggttcttcgttcgcagccgacgcagacgatcttttgcggacgtgcactatagagttcgtgtcaacttcttctgcatgagtcccatcttgttcggcctgttgatcttgtggctgcgttgattgacgttccagcgactccatcaattgcttttcagcactctgatcgatggacgactgttcctcgcctcgctcagagggctctttcgttggctgaagtaaattttcttcgggcttgccattactttcggttgcctcaagcatcacgtcggcaacctcattacaacccttgtgtccctcgttatctatagccatttccgtgtcctctgcattgtgtgtgggtgtggttggatcttgggagtttattgctggtaggataataccgatggaccgagtgggaaccgcagcgagcgaatcatgatcttcatcgtcaagtgtttggagaagcgccttgccaactgactcccaggtcgactcggcaggatttatctctcggcgtaaagcgtgcagggcaagagggccctttgtcggatttaggcatcgtaaatcggcaggaagggcgggcaaatttgggtatggatcctcatgctgtttgaggtatttcaataatgctttttttggcctctgggcggggatttgcgacgcagataacttgtcgaagagggactgcagcgtgctccgcaagcgttgctccgcgaatatctcctctaggccaagctgctctgaccttagttccaagcgattgtcatcgtccgctagcacactttccaagcaataccgagacaaacggtagctgtttaaggaactgctgagtcttgcgctttgcctccagaggttgagatctgagtcgtcacgctccaaggcatccccaaaagaccctaaagccttccttgatgcctccgtcaacttcctttgtgtttcctgctcggattcgggggtctgtggcgcggtttgtatggagtcttgtactgaatcgaggacgaatttgccgtgatttttataggacagataaagcgtttggaatagactagaggtagagtcgttgacgttgaactcagcgattgattctgtagcaagttcatcttgcacatcgtcgaatgcaccccttttgaaatcagagatcgactctgggtatttgaagatctccgaattgagaagagcttgataggcctccgcagcctggggataatgctctggcccttgtgaatgcagcttcagggcaccgtggtaaagcttcaaagcttcctcgatctgaagctccttggtgtcgtcaacttcctcttcgacagcctcatcgggctccacattcaatgcgacccagctcgacatggtatgagctccacgtagggtccctcaaatcttagctgaaaaagagaaatctggcgacagcatcggggaggatactaagaccctagactagatgcgggcaagaagcaaatcaattggttatcgcggacagcacccatggacgttatcacgcgttgcacccaatcggggaaagtgatttggggcctgggtgcctgggtgccttgtggcctggaacccttttcttagagagtaataacagttggggtattctagatcactcttcgctttcccctcagcgcaacccctgaaacgtcttacgattcacgcagcattcattgcattaagataccctcatcttcgattccatcgcgcttgtgcaggtgccatggtcgcgcccgctgttcctgagtatgtgctcatctccccatttacgtgttccccgggttgcgtatgcatggccattgttcgagattgtcaagagttgccactacgaaaattacaggaggtgtgactgacattgagaatataatttaggatccatgaggaggaggacatctatgttgccgtcgatgcgcgaacggagtccttgcagagcttgcgagaactaggccctccagacttggtctatttggtgaagcagcctaaggccaattccactcgccaggtaggttagaagataccaacttttctttcatgatacaatctttcatctgtgaacaatcgattgattttctatcgatcgcagaccggactttatcaccatgtcaccggaatcgacgcctcctcgtccgcgagcttagccgcctatgttaataccctcacattctctcccctcgacaagacgcataaagtggtatcggggatttactggttagaatctatttggtacagtgttgggttcccatgctgatgtctatacagttgctacaatgcattctcccatctcgatatgcgcgtcgaagtcaaaatccccggaagcttggagagctactgcattgatgagcgcggtgacaagcgagttgctactgaggctctttggcttgagaccttcctttgcgccgttctgagggcttacctctatgcggacgacggaagtggagattctgtcaagaagattgttggagttcggcgattcaaccccgtgacaaacacggagatggagcacaaattcttagatgctgccgaaaagctgttcttcttgggtatagatatcgaaccaatttgcctgctgtgtctctgactaacaacatttcaggccgccaactgagctctgaccccgaaacccaagtccctaacactgtgagcaaccacctcacatccggcatcctcaaatacatccacacgactggccgttatacatctggaatcaacttgtttgagaagctccgcacaaaggatgtagaggtttcatccctactggctcgtgtacagattatggcagacgaggaggtgcaagcggtacgcctcatgtacgacgctttgcaggatgttccgatggactatgctcttcttgattgccaggctagtttctgtcaaagcaaaggcgaaagcgaaatggcacttgagtgcgctaagcgtgcagttactgcagctccaagcgaatttagtacatgggctcgcctcgcagaggtatatgtcggtatggaacgctgggatttggcgcttctgactctcaactcgtgccccatgttcacctatcaagataaagatacccctcgcatgccacaaccgtcacgcatcatgctcccaattcttgctgaaagccttctcgatgaaatcgacgaaggccagccaaaacagggagaccctcacgactatgttcacccctcgcttcgaaagatccatgctgctagctaccaaggtactttcttaaaggcgtacaatcttctgacaaaaattgctgctgccattggatgggatcagttactcaaggctcgcagccaggtcttcgtgatggaagaagaataccgtgttgagcgacaacatgttcccaagcccgctacgaacggcaacagccccgccaacgaagatgactctagctctgtggctggccctgactcgagcgagccgtcttcggaagaaactactaatggagatgcgggagacagtcaccctgaaagccccctcgagcgaccggagcaaacagtagcatctgaagttgccaagtctggcaaggaagatgtatgtttaaaacaattctggacgaatttcataatgagctaactgtttgtcacagcccgacccatctcacgcttcatacacgcaattccgaaacaagcgactctgtgaaagatggctagataacctgttcatggtactttacgaggatctgcgcatctacaccatctggcggaccgaaatggcccagtcccgtcaacaagcaatggagtacaagaagtctcctaccgagtgggaaattcttggtgagcttgcacagagactgcaccatttcgacgaaagcattgaggcataccagagctgtctcgccactcggttctcgcccaaggctatgcgtggagtgttgaggttatacgaaaagcgaaatgacaccagaggcatgctcggcgcattgatccgtctcatcgcttggcaatatcgctggtactccgaggtatgctcctttctctagctaatattgctcggaccactataactaataaactattcagttctcccccgaacttttgttcctagttcgcaagctcattgaggacgagggtgctgtcaaggtccgcagcattgtccaagcgacaaacttgcctcaagccgtcctcgacctcacacaccagtattgtcaactatgtgccaccttccgcagcagtggtagcgacacttgaatatgttcgcgatgatcgaagacaagctgagttggagttggaggacaatttgatgccttcccctggatatcaagatagaaagtggagcacaggcagggctaatgaccacccttgatgacaccccttgttttgcactttctcttggtccgattgttagttttcttagatggtatatattttatatgttccatatctagtcgtgtgcgccattcaacatgataggtggatcccgtacggagtaaccctagtagtttggggcccgtatccatttaggcctcgacttctcactgcccaacgctagtatatgcatcggaacccactgtggagagaaacataggactcagccagtagcggcgatttctatgcacgtcatcttcaagtccccgagaacacagcgaggattggctacttccatgaactaacttgatgtccctgaatctagacacataggactctacattcacagcatctctagttggatacaggagactatcacagcaaaacaatccaatcacccactcaaggccgaattgtattttagttcaataaattttttgccgtaaagaaaccaaattctcgatagcaaaatcactgctcttcttcagccgcctcaatttcagacagatctgactccttaggaacaacaccttccttagctcgagcagcactggcagccggaacactcttcgtggcggtatcagcggcactctcttcctcggcgtcttcctcggcgtcttcctcaccaagctcttcgtctcgttcgccacttgcgccgttcgcgccctcggaaccctcgtcatcatcgacgggaatggcttcagtcttctgtttcttggctgccggggcgcctgaaaagaggtgtatgtaagcgtgggaaagttggggatgaagaggatatccataaaggctaagggtaaaacgtaccttcctctttgcctttctccttgcttttgtctttgcctttgtctttgccttctgctgttggtttttcttctgctccttctccttccccttcctcatcttcgtcagactccgactctccttccacctcttcctgttctccctcgtcgcttccttcctctacgtcgggttcggagtcttcatatctaattcaacgcgcgatcgggttagcaaagaccaattatgcttaggaggtttcgcgcgacgtgtttcgaggtcgtctcgtgatggaggcatagctagtacaaccgtgcagaattgtagtggaatgatgcgtaggacatgcaagaatgcgaagaaagggagaattgataacgggatggaacaacatatgaactcactcttcctcctcttcgctctcatcgctaggaagggcctggagctcctcctcagtctcttgctttctcttgcgggtagtcatcgtaaaaatatttaggaggttggtaagaattaacttagtacagaggggagggaaggatggaattataaaggagagagagagagaatgttctgaattggcaaaagtcccttgagtcttgggggggaatggtaattatagagaggagcagagctctaagaagaagggagggggaaacccaagagcataagcgggagtgacggtgacgacatgggagtgacaagaccttagggttaaggtgatagcttacactccggagtgcgtggtccatgacagaagtgtgcgtgtcgccaaccctggattcttgcgctatttacattccgtgcccatctaactatggtatccaaatgttgatatccttggtatccttgatatttttaggtttgcgtcgattccttgctttgcgggggtcttcatggtcattgtgttagaaagtcaaaatctgccatactcggatctagcagattctcatcaagaccaaatccgtatgtgccgaccattccatagatcagatccggtggagggaatccctgtgccatggcattggctcccccagggacctcgcggccttgcagcgcagtatcgttgtttccttggaattgccaagaagcctcccaagagtcaaagcgctcaagcatcttgcccaatccacgtgcgatatgtcgagtaagatgtcgatcaccggcagagacgcaattcattaattcgatcacacgttcaactagccgtcgcacttgtcgagcgttgatgcttaggtaagctgtgttccaattgattgcgaccttgagtaggaaaacagcggagaatgtaaccatagtgtgggtgaagatcggaacgccaacaatcgcatcccgaatatcaggctcctcaagaaccatattgagacatgccattgcggaggaaattgcgatgttggcggattccttgcggtccatggagaagacgggtgtgttggatagtgagagcgcacgaagagaaagcgagttcagctggaactttgcaaaatggtagtgcagaaccactcctttcgatggataagtccgcacataggtgctatcggctgtaatgcattccaagttatgttagaaccgagagttgctgagaattaggctaaaatgtcactcaccagatcgaggctgccagagaagtcgccattggtctactgcaacattgtatacgcgcaactgtccaaaatcttcctcagtcaatgtttgttcagtgtcgctaccaaacattcgatatgcctcagtcaaaatcataaagagagccacttgagctaaaagtcgaatgtctccggggacgatcatcggcagcgcgaggaaggtctcatagttgcggatcaccacatcctcgtggatgacaggtggccgcccataagcaatactgaagtgatggtcgcacacgtaaagcagataccagagctgcgcgcgctcatattgatccgtgtgtccacgggtcagacgctgataactttgatggagacccatctcggtcgcgattcgtactgcatgcccggacaacttccaactcaactctgacagccagaatgcccccacacagaggcctcggatatcatccaaggtgtgggcccgtgtgagggccatattggatacgagcgatacatactcgctgtagcagcggttcaaagtttccgtgcggttcggaatatgaagtgccgcgacagtcaaaacggctgcagaaagaagcgtcgatgcgcgacggacggacgttaaatcgcggtgtacaagaataattccaccccacagtagctggttcatggtgcgactgaagtacgcgaataattcttccgcttcatggagggagatcaatcgtcgtgagataaaatcttcctctagcaatgtctgtttcggtgcctcgacatgattgtttcttaggttccgtaatttagtgacctcgtatagactgcgcataggagcaggcactaattctgggtcttggagatcctgctccggcgacggctcccgagtaacatccatcacgacgcccagtccctcctggtgactgatttgtgtctgcgatcgactgacggaagggtggccatgatacgactcggcaggactggggccattgagagcctccccggaagcataggttgagagctcaggcagtccgccttgtcgcaataggtgcgaaacagccgcctgcagctgttgcatagtcgcattggcctgtgatttccatctataccagcgccattagaatagcgcccccgataggtccaaagcctcaccaaagggccggggcggggtcacacgtacatcccatcatcgttaacaaatttctgtgaaaagtcgtttacgacgcacttgataccgctgcgagtacattttgtacaagttgactctcctgaccgaaactcacagcgaatcttatgacgcttgcattctgcgcctattccctgttaattaggaggcattggagatgatgtggggaagactcacatgcacgagctttggagatcttggggacagaacgtgtcttgctctcttggggtgattccaggccagcgtcatcaggagatcgtttcagtggagtaccggtatccatgatgtgatgctactctagaggatagtgggaagagtcggtgatactccggcacgcagtttaggggagaaatcttctcccgagtggggggaaagcgtcggagtaaagcgagttggcacgagtacgccgaagagccagagataaattgcagtttatatttcaaggaggttgttatggccaatagggtaatgtatgtacaacatagcaagagaaaggaagaggacaaaaataaatcgtgtgacttgggaccccccgcagactcgacttccccgaaatcctcaccctagacgttattctgttgagatattgttggctttttaagattcaggtctgaatttcgaattggacatgttccttggatagagtctagtatatagcttattgtcctcgacttctaactgacaggctgacaggtcacaacacccgtggacaaggcattccccaggattcaaccccaattgagatcccccaaacaaaagagggccctgaaagatgacactccaaggcgattcgcgcacagcagttccacagcagatccacttaggaagtgagtcccggcccaagtccggtgcggaggaccagctacggatcgcctcggacttgatgcgaatgcggagactaaacttacatattgaaatacatcatcatcatcatccctcccatattccctcttcatcacaccaatctcaagaaaaatgcatgtcctcatcactggcgctgccggcttcatcggccaattgcttgcgaaagagctgttgaatgacccagcctatcgcgtcacactgaccgatatacatcaacctccgatccccgcgggcgttcgctatcctcaatccgcaacggcaatcaaggtcgatctcttgacaggcgccaaggacattgtcgattcttccttggacgccgtctatgcctttcacggcatcatgtcgtccggctccgaggacaacttcgatctaggcatgagcgtcaacgtcgatgcgacccgcaacctactcgaggcgctgcgacacacctgtcccggagtccgattcatctattcgtccagtcaggccgtatatggccgaccgttgccagagattgtgactgacagcgtaattccgaccccagagtcctcttacggtgccgagaagatcgtttgcgaaacattggtgaacgaatacactcgccgtaaattcatcaccgggtttatcctgcggtttcctaccatctccgtccgaccgggtgcacccactgctgcagcttcgtccttcctttccggcatgatccgggaacctcttgacggccagcaatgtgtgatccccattaaagaccgacagttcaagtcgtggctatgctcgcccaaaacccttgtggaaaatctccttctcactctccgtcttcctgcggactccgttcccccgcacattcgccagattaatgtgcctggaatctgcgtcacagtccagggcatgatggatgcattggaagccgtgggcggtgcagataaactcgcccttctaacagagaaggaggaccctgcgctggttccaatcttgaagtcatggccgacgcaatttgataacactcaagccatctccttggggttcaaacgcgacgagtctttcgagcaaaccgtgcgggattataaacagtcattgacacaatatagatcttgaaagttcaatgacatcgtttattagttgatttctaaactctttgtcattttacctgttacataaaacaaggaggtttctggtaactatagaccagggttgtgctagtcagtcagttgtcagcccaagtcgccatctgggcaccacccgcttttcctaccaactcacttcaactcttgggctgttcacccacttgagtgggatattctataattttttactccgaaaatcaattgtttcaaaatgccaacacaaatctcgcttctcgtgtacaaaggcgtgccagtagacttctccaaataccgacacacagcgctgcacgccctctactccgacggccaatatgattggcttcatgctgtcggcgcacaccctttcttcaaatttcaaaaggacacagagaacccgatttctgagccgccaatagcctggattcctgtatgtacggtgccggactctgtcactagggagaagattatttgtgcatgtgcttgcacgccggtgcgcaatggcaatagcgaccgagactggaactgccagaactgggtgggggaggccttgactgagctcgtcaagattggctgtttgaccaaagaagagcgcggagtggcgattggtaaaatggtggagattatcttagaagcggagctggaagacgtgagtcccgttctggataactgttctatgcaggaaattatgtggactaatgtggatttgttgcttgtacgtaggatgggatgtattagtctttatggcttttttctgctctggtcaactggtttcagctgtaggttgtcaatttatgtcatgccacaacctgggagacttcaacgacaaaatttcttcagagactgcagtaatgatatttagtttaggtctcttaatacatcgctagtcaaggaaacatagccagctgtacatatgccactggcacataaagcataacaccatcagatcggagacatcattgccaaacctgcgattctctcagcacgcgtcctggaaattgcatcaacagctcgcccaaacctgtccgtcaatggcaataagccgattaaacagctgattcctcgtctccatggcagtgagttgatatgactgccctggcatcttgccaatgatgagcaaaccgtcaaccacctccttaccatgaagagcccaaccaacaaccaatttccccttccatcccataccgcctaactttcgcatctcctggatctcagtcaccggcatagtgaacataaccgatccatctttgcgattctccaattttgcgtctccattctgcggcgtatcagttgtgaaatacagcagcggaggctccttggtcgagtcaataatcgcagtaccgcgcttgcctttgtatcgagcatcaaatgccacaggtccacttggtgttatcctcttccctctatcacgtaggacgccaacccgattcttagcatgatgtgaaccgattgctgctcgtaagcgatcgatccctcttttgctctcaacaccactggccgttgtttctcgaaataagcctagaatgctcgatcccaatgtccttttatggctcttctctggtgctggtggagcttcgaccgcctggacatggtcgtcaggcttaaccagtgcagcttgtttaatttcctcgttactagcacctagggtcagttcctccggattcaaagagactggccgcgagggtactttgtctggtgaggttggaggaggcggaagtggtgacgcattagcttcgccgatgcggagaagagtaatagccagctgagcatttgttggaatacctttcaggagggaactgttgcgagttagcattgtgagcatatgcactgattgaatgcatacttttgcaactgaataatcttccgccaattcggtaggcggcgatttagatatgaaacccctcgtctgatgacagggtctccaaagaagacgagcccgatcagaagtgtactcagcttcataaaaacgtagcaagatgtcattaatgaagctaggaatgccgggaacaacaccgtcgccaggcgcagacgaggactcagtcgaggaaacggagttgttgcggatagagcgctagataaacaaatttaacaacaagccatgagtaaaaccacgagctcttactcacttgcccatcttctcataggtatctgtgatgtcgcctattacgtgcattgaagagtttgcaatgtccatcacgctctgtttcataggttgtcgtgttttgtcatgggagtctgtcggtaccttcccatgggcagcgctttgcgcatcggcagtattggcaacaatatccatcgcgtctggaacgtcatcttccaagggtgcatcatcagggaccccttgatcatgcttcccaactgcgcttcccacggccacactggcaacgcttgcaacaagattactggcctcttgctcggctgcttcgcccttgaatttctcgggggccccggtaatactatcctcagacccaaggattcccgcctttggcttttgtacaccacccgtatctttgttgacaagagaaattggagcgggagggaacatgagtgatctacacggtggatagagcaccagggcaagtaggatgaccagcatagttggaacaagtagatcgagaaggcatgatagtacgtagacctacataatatcagtagcgctccaaatacatttctctagaatggagacataccgtgcaaaaggcagcggttcgtcgcggctccttccaagaccgtagtcgagcaatatgtttgatacaattggtcaatccaacaacaacggttgtgtaaaaacgttcaattgtagccctgagtttatccggcgagaattcatcgtcgtcttcacgcgtgaaatccagtttctgcagggaaacatcgggaactgctttgactcgatacatttgctggtgtgcaaattgacaaggtcggtttcaattctcctacattttcatgtggggtgctcaggacataccttgtcgaatcgtctaatgagcatccacaaatcctcatttgatagcccggccactaatggttcctcgatgacatctggagattcatcccatccaatattgctaatttccgctgtgtcgccagctttttgtgcaaggcctctctcatcctgttttatttgagatagcacatggctatcggttggtccctcgggaatttcaggatccgtagtgagattgttgtcggccttgattgtagcacggtcgactgaagcggatggcatcgcctgtctgtcggttgcagacatgagtgtgaaattgttctaaagttccctagattaacttgaagggtttgttttgaggtcaaccccattgagaggaagctttccatgggacctggaacctgtcttgtagttgcgcagactgtcgacgtcatcttccttcggtggcaatcaacacaaccttggaagcaaactggattattttaagtaacaaatgtcatagaataaattgtggtaataaggtttggctggtgaaaaagcactcgaagacatagacctgacttttattgtttgggtttgcgcgtgggttgacgaccaaggcggctggctgcacgagtgccattctgggtggtcatcaattctagttctaactgcaatgcaaaggatgaaaatgacctcgagatgtaaatgcgactaaattatataaatgagctcgttgtaaatcggcaaaccaagtaagatggatgcaagttaagagcagccctccccaggtggtcttacaaggattgcaatcaaccttccttatctctcttatcaacacgtgccagtattcccagaaaggcaacatcatcgcgtccaagcaaggagaactcatcttgatgataattcgctctactaatctgccatccagtcactggacactcgactcgccatgagcgaggagtgtgcaaaccccctactcctggggtggattaaagaatggctggatcaagctcgagaacggaatagcaaaggcgtgaccgtgtacgtatctcttggcgcccatcgggaaaagactatatctgacatcttgcaggtacaagaaggcttatgagtcaatgaaagcctgtccgttagaatttcaacatccgtctcaagcgcagcaattgaatggactgggtcctaaattgtgtgaccgcttgaccgataaactaaaggcccactgtcaagaaaatggacttccaatgccggaactgcctgggaaaggtttgtggtatcacttgcaccctggccccggaaacggacgctcaactaggtcgaataggtggaaagagagcatctgaaggcggcgtggatcaaccggcgaagaagcctcggaaagccaagccgtatgtaccgacattacgatctggtccatatgcactgatgttggccttgggaacccaaaacgagaatgaatcccaggggatgaccaaggctcacctgatcgaggtggcccaaccattctgcgacagttcgttcacggcacccccggacccgaccaagttctacactgcctggaattcaatgaaaactctaattcagaaagacctagtctatgaacatggtcgtccacttcgaaagtatcttctttccgaagaaggctgggaggtggccaaacgtctccaaaagacattacctggcgatgttcaaaccgccatgtttggctcccaagctactgcaacgactgagtcacagcaaagagcatcgacagccgaacttgcctcatttcaacaagatgatgatttattggcagacgctcaagaaaaactatccgaacacgacattgccaacatcgagcccatccttttcccagctaagagcttcactatccatctcgttttagacacccgagaagtccgcacctccaccgaccgcgactatatctccggcgaactgatcaagcaaggaattaagccgcaagtacgtgccctggaagttggcgacgcaatgtgggtagccaagtgtcacgatccaactttcctcacgagacatggcgaagaaggtgatgaggtgatgctggactggatcgttgagagaaagcgtctagacgatctgattgggtccattaaagacggccgcttccacgaacaaaagttccggctccgtcgctccggcatcaagaacgtcatctacctgatcgaagagttcgcagtcacgcatcctgactcgactagcgggagtgcagctcaatgccaggagatggttacctcggccatcgcctcgacacaggttcttaatcaatactttatcaaaaagacgaaacatctggacgagtcaatccggtacctagcgcgcatgactctgctcttacgaaagatgtatggggtcgaagatgcgccctccatcggagacactgatagcaatatcaaccgtagcacggttcctgcatctccagtatccaaaattggcctcatccccggccgccgtctctccactgactcctacctcactatactggataatctccgctctcaagatccgtccatcacatacggggtttcattcgtgaccttctccgcactcacttccaagtccgacgttcttactcttcgtgacgtatttcttaagatgctgatgtgtacccgtggcgtgacgggcgaaaaagcccttgagattcaacagatctggccaacgccacggcatttggtggatgcgtacatggctctagaatctaaggagcgagagatgatgatagcgactcggatgtcggaggttgtagggcggaagaaagttgctaaagatctcagcaagcggattgcagaagtttggggggaggtgaatttgtcttagaaaggttttctttcaaggctcctttgaagatgacatagtaccgagttcattcgcaggtattagatacaaaagtaacgccaaaatgaaataaatgaatatataccataatgcctacctcttccttctcacaatcttcataatactttctttgttaatcctcaaagccaagctactcagcacaacagaaatactacttaacgccatggccagagcagcccacaccggactcagtctccagtgctcattggtcatgatcattt

SEQ ID NO: 153 - DNA, 4395481 bp, Penicillium roqueforti (residues 1,465,162-2,930,322 of 4,395,481)
  misc_feature (85051)..(85355): n is a, c, g, or t
  misc_feature (96931)..(97054): n is a, c, g, or t
  misc_feature (167476)..(168900): n is a, c, g, or t
  misc_feature (174646)..(174786): n is a, c, g, or t
  misc_feature (186876)..(192766): n is a, c, g, or t
  misc_feature (360737)..(360928): n is a, c, g, or t
  misc_feature (391873)..(392032): n is a, c, g, or t
  misc_feature (496632)..(496820): n is a, c, g, or t
  misc_feature (596164)..(596393): n is a, c, g, or t
  misc_feature (682707)..(683337): n is a, c, g, or t
  misc_feature (718997)..(719085): n is a, c, g, or t
  misc_feature (843383)..(843552): n is a, c, g, or t
  misc_feature (1092662)..(1092833): n is a, c, g, or t
  misc_feature (1157494)..(1162593): n is a, c, g, or t
  misc_feature (1192529)..(1192706): n is a, c, g, or t
  misc_feature (1228208)..(1228319): n is a, c, g, or t
  misc_feature (1338736)..(1338891): n is a, c, g, or t
  misc_feature (1570125)..(1570326): n is a, c, g, or t
  misc_feature (1572374)..(1573011): n is a, c, g, or t
  misc_feature (1778870)..(1779017): n is a, c, g, or t
  misc_feature (2068372)..(2068449): n is a, c, g, or t
  misc_feature (2226844)..(2227063): n is a, c, g, or t
  misc_feature (2309559)..(2309714): n is a, c, g, or t
  misc_feature (2399228)..(2399407): n is a, c, g, or t
  misc_feature (2468061)..(2468277): n is a, c, g, or t
  misc_feature (2498600)..(2498659): n is a, c, g, or t
  misc_feature (2576485)..(2576740): n is a, c, g, or t
  misc_feature (2701275)..(2701495): n is a, c, g, or t
  misc_feature (2766375)..(2766490): n is a, c, g, or t
  misc_feature (2901256)..(2901520): n is a, c, g, or t
  misc_feature (2994258)..(2994403): n is a, c, g, or t
  misc_feature (3046124)..(3046244): n is a, c, g, or t
  misc_feature (3064270)..(3064600): n is a, c, g, or t
  misc_feature (3131055)..(3131213): n is a, c, g, or t
  misc_feature (3154989)..(3155736): n is a, c, g, or t
  misc_feature (3156691)..(3157002): n is a, c, g, or t
  misc_feature (3186953)..(3187613): n is a, c, g, or t
  misc_feature (3198500)..(3198771): n is a, c, g, or t
  misc_feature (3203205)..(3205179): n is a, c, g, or t
  misc_feature (3205906)..(3206218): n is a, c, g, or t
  misc_feature (3207664)..(3207822): n is a, c, g, or t
  misc_feature (3257357)..(3260954): n is a, c, g, or t
  misc_feature (3261760)..(3386759): n is a, c, g, or t
  misc_feature (3388221)..(3394651): n is a, c, g, or t
  misc_feature (3513925)..(3514255): n is a, c, g, or t
  misc_feature (3520773)..(3521165): n is a, c, g, or t
  misc_feature (3528586)..(3531140): n is a, c, g, or t
  misc_feature (3533531)..(3533642): n is a, c, g, or t
  misc_feature (3544018)..(3544205): n is a, c, g, or t
  misc_feature (3640869)..(3641060): n is a, c, g, or t
  misc_feature (3768087)..(3769809): n is a, c, g, or t
  misc_feature (3862432)..(3862766): n is a, c, g, or t
  misc_feature (3867803)..(3868440): n is a, c, g, or t
  misc_feature (3874002)..(3874693): n is a, c, g, or t
  misc_feature (3907382)..(3907609): n is a, c, g, or t
  misc_feature (4023516)..(4023672): n is a, c, g, or t
  misc_feature (4214586)..(4214731): n is a, c, g, or t
  misc_feature (4215818)..(4216330): n is a, c, g, or t
  misc_feature (4384523)..(4386942): n is a, c, g, or t
  misc_feature (4389367)..(4392880): n is a, c, g, or t
  misc_feature (4395479)..(4395479): n is a, c, g, or t
caccattaatggttttatgatgatggccactcacgataggatagaggacaccagcagcaaccggaaccaaacagaggttatatataaccgcccagccaaagttcatacggactcgattgaacacacggcgactgagcaggaccagctccaaaatcgtgctgagatctgagttgaggaggatgaagctggcggaattgatagcgacgtcggagccagatgccatggcgatgctcacatctgctgctgccagagcgggcgagtcgttcactccgtcgccgacgaaggcgacaatgggacgtgaagggcttgaactcggtgtagtctcaccaccggccggtgttgtattctgcgaacgttcttgaatctgacgaacaaagctggctttctccgctggtaggacattggccattaccttggagcgcgggatgcctagcatgtctgcgacggcgtgggcggtagtctggttatcgccagtgcacatgaagacatcaacttgacgcttctgaagctgggagattatctcgacagcttccgggcgaatcgtgtctgatgtggcgaagataatagctggtataaagttggatggttcggtggatgggggttgtacttgacgtagtgaaaggactgcagtagactttccagctgactggtatttcgccagcagactggaaacgaaatatgtgtctgtttggggggatagtagactgttgagaagacgttcattgccaattgcggcttcatactgcccttcgtgctcggagccagacacagtaaaagttcctttcatgccttgcccggaaatctcatgaacgtctgacgacttgacagaggaagatttttgtgttttgcagaattcagtgattgcctgggcaatcggatggttgctgctctcttccattttccgagccagagcccatgcgaccttcgcaacttctgggtcactggtcaaaacttcatgttcagaaaccttcagacttccaccctcagtcaaggtgcctgtcttgtcaaagacgattgcattcaagcgactggcttcttggaaggcttcaccaccaccttttaccaggataccatacttcgctgctaggccgcccccaacgaaaagcgctgtaggggctgcaagggccagaccgcagggacatgccaccacaaacactgaaatggcaaattccagcgcccagaatgtccagccaccatgtgcgacatcgagataatctgcggggagcacaccggaatgaccaagtgccaaccaaataacgaaagtcgaaatggcgatcagagtaataataggcacgaaatgcgaagtgagaagatcagcaactctttcaagaggtgcacgcttgctttgcccctcacgaaccacggcaatgatttggtcaagcatagatgaaccaccaagctcagtaatacggatccgtaccggctggccgacgttaaccgagcctgtatagaccatgtcgtcggctgttttcttgactggtcgcgattctcctgtcaaagagctttcatcgaattggtatgacgcgctgtcgacgatgactccatctgcaggaggcgaggcgccatggggaatactgacgacgtcaccaacttccagcaggtcgacattcgtacgcttaactccatcttcggaagtgtcatcggacaacagtgcctctgaaggtcgaagcttgcccaaagatgtcacagcatcgccagttctggctttactgtaggcctccaggaagcgaccaccaagaatgaacagagttaagaagacaaccgagtcgaaataagtcgtgccatgggggctcgacttggtacccacaactgcgtcaacgataagtaccgccaaagacgagatataggctaccgatgtgcctgcagagatcaaaaggttcatactaccaaaacggtagaatcttcgaaggatcggcactcgacttccaggccgccatagcgcataaacctccttcgcagcacggacatggaacacatcagtgccgtagaacatgacaggagttgacattataaacagcgcccattcgatgcgggtcacactgccagaccacatagtttgctccagatacattcgaacagagttttcagatgagacaagagacataaatacaatccctatgaagaaagtcggaatggcactgataaagacgaaaagcaatcgcgccaacagacggcttctttcatgatgctggatcgcacgagaccggtcttcattactaggcgggtgataaacagtcgcgcgaaaattgtcattcgccgagttgatcgctgagattattttgcgaacggtaagaaatggtggctgtggagtatatgtgattttgacgatgggggttttctcggagagtgcctcctcgatggtgacaccgggaaccgatttcactgcccccaaaacagtttgtgggcaatggtgacagaacatcccatccacttgtatagagattgttctgatatgggcagtgctgaacttttcggtaccaattttcaatggagagacactattgacggtggcatcgtatccgaggtcttcaatcttctctatgattttatcaagattgtctcggccttcaaattccaccctgccgctatgggaaagcaggttcacagacacatcacgaataaaaggaagttcttcaagtcctcgagtcacccctccgacacaagagccacaggtcatgccggtgattgcaatctcgctgacgtagtttgctgccagctctgcagatgccggtggtttggggacttggttcacctcgtcaagagatgcttcgaacccagcatcattaatttgctcaacaatctggtcaacattatcgcgaggtccaacataaattactgttgcgctgttggtgagaaggttgacagtgattttgttcacgaacccgagttgttgaacctgtgcggtgatgctgttggcacacgacgcgcagctcattcctccaatgctaatctgtgcggtgaactcatcggatgattcagcggacggactaggatgtcttgcgatgtctgtgggtaatattgaagcagacacatcaggttgaacctttgctttggaggtggcgaatgaacggagaccctcctgcacagcatcctctggggttgactcaagctttgtaacagtgatgtcttcttcgtgctgcttgcccaatggtcggaagggaatttgtgaggacttctcgtccaaagatcctagctccgttcgagaagaatgacgagaaaaggtctctagctcttccttcctgcatgcatcgcagttggcaatatgtcgtttatgtcggctcgtctgaattcgctctttaatattggacgagatactagaaacagaggttcgcggcgaggagaagagcgtagagccgcggtgattccaggaagaggtgtcgagttccgcgatgagccttcctcgttggtcaaatgtcgttacatagtgtacttcaaacgcggcatgaatcagcgcgttgacgaggtcggcaggccgaatggcggaactgtggctcgcacgcacttcatgcgtcaaaatggtgacttcgatgttttcgactgtaggagtctcagagagcacttcggtgatatatgcaacacatgatgtgcagtgcacattcgatacaaaaaagacactggtctgggtatcaacctcttgatgggctgcctccagatcgaaagacttggtgttgggttttgatgacatgactgacggagatctctgcgacctaaagatgaggtacagcgtggaatatatcgatcttgcaagtcctcagcagagtcgatgattcaatatcgctcagacaaggttagaaacgggcagttgtcgggattcagtgtttacagagcggcctgatatcaaggtgaagggaagagcgattataaaactgggcagggaaccttttgcaatgcagtataatattccactaagaaagaaaagaaagggaaaatcctagaagtgggtggctaagtttaaacatggcgaagatgcgccatttgtgcgcgattcctccaaaccacgcacaaataccgcattccagacatgtcgaccatgacccctgtgaccactatgtagtatgtcgctagtgtcgaggcaggcaatcaagaatgaggccggattctcgtattcgacgttgtaaaagcaaccacttcatgtggagtaccaagtctgatgatgctgttgcagtagcagtcatggatcatctaggaacctcaggcaccgaggcgcgacaaagaccagacggttctaagcctaattgggctagcgtaccctgagccaattaaggtcacgtgattcatgaatggaatccatcagatcagccatggagcaggagacaagcgacaagagataaaggaactgaactgaatcgagcgatttattcatttatacctgactcactcactcctggttcccgacatccaatcagctagaacttcaagtcgtatgtccgaattcagctctgcagattccggccaattacataagcaggttgaatacttttttctcaccttccactttcccttatcgcgattctcgtgacagtcgataaacccttcgctacaaaaaaaaaaaaagaggctgcgcgacgtccagttaaagaattctgaggctgtgaggactcggcctccatcgagtgcccctgtctacattcaatctctgacctcttacttttcgctttaaccaacatgtcggcacccagatccggcgcgcgtccaatccctccccgcgggccccggcctcctatgggacgactggccagtctaaaaccccccaactctactcctatcaatcgtccaacggctattggacgctctcaaccaccccgcccgacaacacacccgaaaacatctaattgtccaaacccaggatgccctgctccgcatattgtcgatgatggaggcgtgagggtctgcacgggctgtggtacagttatcagcgagaacaacatcgtctctgaagtcacgttcggggaatcctcgtctggtgcagctgttgtgcagggatctttcgtcggagaagatcagacacatgtacgcagctatggtccgggtttccagcgcgggggcgccatggagagccgggaaatgaccgagcaaactggaaaccggtatatgcttcaactttcccgggctttgaccatcccggagagtgcgaccaaagctgctggtcaggtgtttaagcttgccgtgggactcaattttattcaaggtcgtcgcacaaagacggtagctgcggtctgtttgtatattgcatgccgtcgccaaaatggcaataccgtcatgctgattgactttgccgatgtgttgatgatcaacgtcttcaagcttggtcgtacatacaaggcacttctcgacgaactccgcctaggtggcaacgtctttctcatgaaccccatcgaccccgaaagtttgatttatcgtttcgcgaagcagctggaattcggaccctctctcatggcggttgctggggaggcagtccggatcgttcagcgaatgaaccgcgattggatgaccaccggtcgacgcccagctggtctctgtggtgccgcactgattcttgccgcgcgaatgaacaacttccgccgaaccgtgcgtgaggtcgtgtatatcgtcaaggtgacggaaactactatcagccagcgtttgaacgagttcggttccaccgagagtggtgaattaacagttgatcaatttcgttcggtccaattggagaacacccacgatcctccatccttcactcgcgggcgagaaggtcggaaaattcgtatcaagaagttgccagagactgcggcggaactcgaagatgatgactccccaacggaaagtgaagcagaatcagtgcagccgcctcgtatagatgccgacggtttcgctattcccagtctccctatcgacccggctttgactgcaagtagcctcggtcgacgtgcatcaataatatccaaggcagtgaatgaagtcgttgaagatatcaggaacgagccgatccactccaagggcaagggcaagcgacaacccacgccagaaccatctgccgagcaggttgcatctgaagcggcgctggaagatgaaatgcggtctatgcttgcccaaggatcatctatgattgagagcgtcggctccgaccaacccccgcggccgaccgtttccgacagcactgaaatcgatgctgccgagtttgaagatgaccccgaagtcgccaattgtctgctcttgcctgccgaagtcgagatcaaggagtccatctgggtgacagaaaacaaggagtacctccgcactcaacaagcaaaagccctgaagcgggccctggaggagtcaaccggcgggggcacacctcgcaaaccgcgcaaacgccgccgtggccgcctgggagatgtcacctatctggagggtgagggcgaagatggccgcagctcccgtgcctcgacaccggctgaggcgacacgtcgcatgcttgagcgccggggctacagtaagaagattaactactctcttctggacacattgtatgggggtgaagggggagatgcaaagacacaaagcctgagccgaagccaaagtcgcagccaaagcgtcgtctcacggcgcagcgccagcatcgaaccgcaggcagccacacgatcccggcgtgcaacgccatcagatgccaaatccatccgtcctggttctaccgcaccactacctactccgccgtccactgctccagataccattcagggtgcaaagccgctcatagccaaggatggccccatgaacaagcttgggacagatcctgaggaggatgaggatgaggaggacgactatgatgacgacgacaaggatgatggcgtcgacgacgcatttgcaggcaattacgaaagtgactatgactatggcgatgatgatgactgagaaagcagacctcagaagtccttacgagcattttgtcatatgtccttttggtggattggagttgtgaggatgcgatcggcatccacttgctttctttgtcttctattttacggccttcgagatgataccatgtacctatttcacccatatgagcattggggtttccaaatttaattatcgtattaatatctcacggttggaattggcaccttgctcggttgcctcgacgtgctctaagcaaaacactcgctgaacctgagtagtatcaagctctagcgcaccaatagtaatgatgattatcattataccacaccattttcccacctatttacctttcacctattccatgattgtaggtaaatattacttgaatggtcaaccgtgccaccactagttaactacatcatagttcctgctttaggtaatgtagcttgactgagcatggtaagtattcggttccttagaaatgcccgcgaaaggcaccaggtcctgagtttagcatctattttgggtttcagatactcttgacataagcaggtgaggtaacaagggaagttagaagaatagactgagatgagaaatctaataggtaccgacgctcttggctgggtcacaaatgacaacgggcctaggaagtcaagagctgtcgtcaggactaggtatcaaagtgggcttatttaacgaccaggaacatgtacttatgtacatctgtatacctcctgaatgctagtgaaagcaatcatagttcgtacaaccaatatacgaaatcaactgggctggctctaggtgatttgttcttaggcgtaggttttcccctgctataactcgcataggtgtataatacaaggaactcgggtttattatggtattcacgccagaatgatttcaatctttttgatttggtgagatagatagtcgtaaataaataacggttgtcaaaagcatgttgaagaactcccagattacgacgccattttccatgaaagagatggaaagcaaaccacccaaaaccatcaaactctccaccgggcgggaaccgaattgggccggactgggtcagtcaggagcgtgagtctcataactaaataagcaatagtgaagaaatcttgagaaaatgtttttaaaaaaaaagaaagaagagaggaaaagaaaatatgatagaacagtcggaaagaagaccgagatcgatcgcggattggttggatgtcgagtcatcgggtcggatcggtcgatgtcgtcggatggcacgggattgagaaatcgaatgcatttttggaagaagttacgagtcgatctccattcccatttccgcgcctccgctcagttcgtcgaggctcgatgcttgcgggttgttggacagggcttgttggagaagtggcaagccagtgtccatggagttgaaggagacaggctgtgctctaggccggtcggtagctccgaggggagtagagccctcgaatatgatgggggagctacgaaggttttgaagacatccttcccaagaggaggcaacgagctggccttgagtgaggtcttcggtgaagagataaaaggcaggcaaggatccagaagttggagtggcagccacaagataggcgttcagagcgcggcttttcataagcatctgggagccgtgcaggtgggccgagtattggttgtcgatatacttggtccagccacgaacagcaggcgccatgtcaccgtcagtgttgacacgctgccagccgatacctaggagacgagtggcatcatctactaggggctcaacgggcggggcagggcctgcattgagagtgcggtgctgatcgttggacctagggtcgtccaggcgttgacggatcgaggacagtgcaatatcatccagacctggtgcagatttatcaaggcgctgagacttgcggcttacttcagcagcatcagaaagcagcgcgtttgaccgcgaggggacaggtgcagcagcagcctgttgcgcctcagactcttgttcataccatgtgccggtttgactctcggcagatatcgcaaggccagtctgcgggtttaaaagagccatgccttctccatagataggccggaccttggtagctggcaccgcctggtgtgccagaggcgcgctgggagcaacggcgtcttcaaaagtggcctcatcacgggatcttttgcgggagggcttgggcaccgcaggggcagacgataaattgaagctcgaggggacagacggtgtagagctattgttggtgaagacagggctggtgtttgtcggatagctgttgaagctccctggggagtcgaggaaagaggactgggagaactgagcgaaggcgtgttcccggggaggagagaggaccgtgaccggcccgtctgagaggcgattaagaatcattggagacattgttgctcggaatcgtcttatatttaagccaaagggaactgttctgttagattaggtgagtaagacacaagaagcttcaaccacctgtggaaagacggaagtaagagaggtaaaaggaggaagatatctcggtaagtaagtagaagaatatatatagatgagggagaaaggtgggtttgagagaaaagagaaagaattgggaggagaaaaatgggcgaaatgggggaaaaggaagaaagtcgagcgaagtaagagtaagagcaagggtaagagcgtgagacaggaaagaacgatctgaagaagtggatgaatcgatgcgcgaaatgcggaggtaccaagccgaacggtaatataccagcaaaaagcagctatccgatcggccgtaacggtaatgatacgtgccctattaacgggtactattggctcatgcagccaagacctcaagtggagtcgaggtggatgggtccaggccagaggcgatcggcctatgaggacggacctgtcgcccgcgaggattacatcacgtgaaattcataaaagacgcatacatatatcacgtgctttatgtgaggtcatataaggttcaagtctattgagatactataacgacatgatgggaaaaaagaaaaaaaaaaaaacacaacgaccacaagatcaggtccaaagcaaaccgacaccagagctcgtgcaagtttaccatcaatcaatgctcgtagaaaaaaaaaaaaaaaaaaaagtacactgccaacaacaacactttcatgtctttgtatacatcacagaaatgtggctggaaaaagaaaagattggtaataaaacagccaaaaacaagttcctcctttctccattgcacctcaggggcccatagagacaaaagtatgagcggcagtctctgcatgtaaccgagagacgggaaggaacggatacccgctacataactgcacttatcctctcgtgctgtcgatccgagaatggatattgtggcttcaaacactgggtcgggttttcggtgttccaattcataagacggaaaaacaaggatctgataagtgcacttaagcattaccagcagtagcaccgccaaggtagcccttgacacggtcaacagagtcattggcgtagctgggagccatagagccaacgaagaggaagaaaataagagcggcagcaccaaagacgacaaatttgcgctgcgcagggcggttgttgccatagtcagcccaggcacggccggcagacgaagtgtactcgcgcatcttgtcgccgccaagcttgtaccaaacaagacccagtagagcaatagaataaccgaagaactggaggccagtgacgggagtctgccacaggaacatggaggcagcaaccaataggatatccttgaggacaccgcacagagtcatgaccagggaagaggtcttgccaatctgtagagagtattagtaacgcttccctcgggagtaagatgcgggttgctaaagtatcacttaccaggaaaacgaccgagacgttgagcaggaaagccacaacggcattgagaactagaagccagataccaacggagtagacatggtccatggtgacatgggggtattccaagaacagagcaacgacaccgttcatgacggcacagatgggggcgaagtagtacagagaaaccatggggtccatcttaaagtcggcggagctaagcagaccctgtaccatgaccagacgggtggcctcgaaaacgataccaccgagctggaacaggaaaccgaccatgttgaacttgatctcaccgaaggaggcaatgatcacaccgatcacgatgatggagacgttggccaggaccttcatgttggccggagccatgcccataccccaggttgcgaggagaacagccacaggggtggtggccttgagcatttggataaaggcaacgctcaggtagaggtaggtcatgttaccgcaaatcaagctcagactgaacattataccgatagggacgatagcgcggaggtagacacggccggtcatcttgaccttcttgcggccatcgaggacagtagtggtgcgagcgaggatttgggtcatgacagtagcgaaagacagatgccatgttgtgaggatgatggggaaacctattcacagcgtgaggttagtgccagtttcctcgcattgtatctccggtctgacttacggaagttggcatagtcgaggaggtacttgttgaacaggataacagtggaactcaaggtgatccatgtactatcaaaatatcagcaatgttctccgatctgtctggttccttccgatgttgctcacgtcacatagaccgcggggtggaatgtaatgcccggctgctctgtcttctccgctgcggggttgacagtaggcaaagactgctcccggggagtctcgccagaggcgcggaccttctcgccgtcgctcattgtaaaggtttgagattgatcggacaaaaagcgcttaaattcaaaaggtcgtggccgggacaggcttccttgactaaatgcggaggaagccacggagaaaagtgggcaagataaaaagggaattagagggaaatgatcactaaaatgctccaaagattaacgagtgcgacagaaagaccaaaaaaaagcgataaataaaaacgagcgtggatgaagaaagcgtgaatgaagaaatgatgatgaaggttgaagggatggaatggggtacgtactccgggagtaatttttttcggcaccaaacattaacttcaatttgggggtttgacggagaaattaagggaagaaaaggcagttattgtaaaggaaatcgacaagaagccaaacataaaacagcaacgacaagaacagaaacaccaggtcaagagagatccactcgccgcaaacagaaagtgagaggagaaggctggtgtatgaatgtctgtacatgtatggaaagattggtatacgaattaccattactccggaccttggttacggctctgctaaggccacctatactcttcgcttataatttctactgttacgtagtggtttcatctgtatacccgttttaccagaaccaataccacttgtactttactagctcttaattttaatttgtgaggccatggatttgctcgtggcgacagtctccgactccccttttccctgaaataaccaccaatcacaccagcctagtcatgggatccactggccctaatcaacacgcttatccttaatctcaatcagattcccatcctaactcatgtgaatatctatataggtatgtttgacatcgacgaaaccatcggcactctcggaatgtcctaaatcaacgggtttgaaattcaaacccgaaacagcgcagatccaaattaatagtagggcattacgcaagcagctgttagccaaggcccaccagaacccgcgttcagtgaccctctggtccatctggtcccttacgggtggagaatgcggcgatccgccctctgtctgacgcaatcaggggacttccagccccccacaagcatattgtgcttggaccagtggtggtggggggaggagacccttaagcttttggtgttaacgggagttagtgtttcgagcggcaattggcaattggcaattggcggtgtttgctggttcgagaagttgttcgtcaagggggcgatcaatgggatcggttgtttgtattactttcttaggagtgacaatcagtggaaccagatgctggcattttgtaaatctcgcttctcatcgagaccgccagatgggatgatcaactctgcggatgttgctccgggaggattcaaggtgtttccttttaggacggtcctattgtattggctatttgatgcatgtgagacacagggacagtgtctggtgtactccgtacatcgtggtacaatgtatacacggggaaatcgatgtgatgaaacatggatcaccatctttaataataagttcaagatagcctcgtttggtctagcatcacccttgatggaggtccatacaaactacggagtaccaaagcaatattggcgtcctaatttaaccacagccaacaatgtaccaatgcctacatcggtggcgtttttagcccggccacatttgatcgagattcaatggttgccccctatccatacagtatcgcccctttttctctgttttcttttttttaattcttctagaataatgttctgacctgggattgatatgataacgggcattccagaggggagatactgaatgctatccaatacccactaggggaattctaatatcgactcacccgcatgcgaaaagtaaatgcagattccatgcactccaggtccctgcttttggaggtatcatgataagcttaagaccaataacggctttgcgctaaatgtgatgtgttcaatcttaaccagggtccttattacagcgtggtgagatgagattgccttacgcgttcttttactccagattacttgcctcttagattgagccctgcagcactgcctccccctgagtacattattgtaattgtaattgagcttgtcgatgtgatagggcctcgggagggcctggatgtgaggttaaaaaaaaaaaaaaaaggaaattaggccataataaaaacagggaataacaaatcataacaaatcaggaatcaatatcaatatcaatcccaatacgaatcagtaaagctgaaacaggcacgtcgtctccaccggatccgtttaacccacaaacccaggtgcgtctagatacccttagcttggccggtcacgttgtcctcccacttccccttcttctttggttcctccgcttctttgccctttattatccctccattccctcttcatcttctgcagattcctgcagctgtgcttctatgctgaacgtcgcccgcaagacattcaaacgagtccccagttttcaggacctcctacaaggcagaatgacccaccctgacatgtaagcacttgtccacccatcaacatccgtcatcgctgacaattgcttcgcagttctgttgacgttctcgtcattggtgctggcccaactggtttgggtgccgccaagcgtttgaaccagctcgtaagtctttcgctgcttatttactgtgtgggagaggggcacaaaaaaaggggggaggggtatccgggaattgaaaaagctaattgagtatacagaatggcccctcgtggatgattatcgactcaaacgagacccccggtggtttggcttccactgatgttacccccgaaggtttcgtaagttgcgactcggtctcaattgtcagtgtcaacactaacctagttcacagctctacgatgtcggcggtcacgttatcttctcccactacaagtacttcgacgactgcatcaatgaggccctccccaaggaggaggattggtacacccacgagcgtatctcctacgttcgctgccaggaacaatgggtcccctaccccttccagaacaacatctccatgctgcccaaggaggagcaggtgaagtgcattgacggcatgatcgatgctgctatcgaggcccgtgtcaccaacaccaagcccaaggatttcgatgagtggatcgtccgcatgatgggtacgggtattgccgacctcttcatgcggccatacaactacaaggtctgggccgttcccaccaccaaggtaagtcttgacttcacgtccctgggacggaaacatgctgatcgatgatctttagatgcaatgcgcttggctcggtgagcgtgtcgctgctcccaacgtgaaggccgtgaccaccaacgttatcctcaacaagaccgctggtaactggggtcccaacgctaccttccgtttccccgcccgcgatggtaccggtggtatctggattgctgtcgccaacactattcccaaggaaaacacccgctacggccccaataacaaggtcgagaaggtcaacgcctacaacaagaccgtcaccctcgccgacggcaccaccattggttacgagaagctagtctccaccatggctgtcgactacctcgccgaggccatgaacgactccgagctcattcccctcaccaagcagctcttctactcctccacccacgttatcggtgttggtatccgtggtgcccgccccgaacgcattggcgacaagtgctggctgtacttccccgaggatgactgcccattctaccgtgccaccatcttctccaactactccccctacaaccagcccgatgcctccaagaagctcccgacccttcagctcgctgacggctccaagcctaagagcaccgaggctcaggacggcccctactggtccgtcatgttggaggtctctgaatcttccctgaagcccgtcaaccacgagacccttcttgccgaatgtatccagggtctcgtcaacacccagatgctccagcccggcgatgagattgtctccacttaccaccgccgcttcgaccacggttatcccacccccaccctggagcgtgagggtgccctcacccagattcttcctaagctccaggagaagggtatctggtcccgtggacgcttcggcagctggcgctacgaggtcggcaaccaggaccactcctttatgctcggtgttgaggctgttgacaacattgtcaacggtgccgttgagttgaccctcaactatcccgactttgtcaacggtcgccagaacaccgagcgtcgcttggtcgatggggcccaggctctcgccaagaagcagtagataatgaccccttatttctttttaacttgtcccaccattcttgtctgaagtgaagggttcttttttttcctccattttttgatacaattgaaacgagctcataccgtcatgggaaaattatacacgagagagcatttgaagcggcatctggaagacgatcgatctttgttggcgtttcatcttgttacttaacaccatccaacccccttcaccctatcatctacctattattccctcttccattagccgacagccgggacttgcttttgatacacttttctagactgccttgatatgtgctattgctcattttaattcattcagttgaccgatgaacctcttccctttctaaaaatgcagtggctttctcgatacttagcacgtgacagtgttgcacgtgacccatatccgaccgctgcgacgtgctaagcagatctcaccctatgtgggcagagtgtttcgtggcatttctcaccccaccaataccattgctccctccagttacactcgccacaatgcagatcaccaaccagacaatcactaacacacacaccgcgagagcctatccccatgtatatccaagccatgtccacccatgaacctaggaaccaaaacccctgaatggcaggcccctggattcgacacaatcaatctaccggcaaatgccgccacagcgccatcaaccagacacggaaatataccggaacaaggcagttcaaggttattctacgcggtggcgtagtggatccgcgcgcagagaacgcgggtcaaccatgaaccaatcgtatcgaggatcgaaaatgtacaatctaaacggcatttcctgcaggcaaaagcaaagaaaagtccgagtacaacatcagcaaagtacctcagcaatgcagagtgacgtaggtcgggggtttaacaccattcttgtggtgagatgtgtcaatggctaaaagggcactgccgaggccgcgtcagatctggaggcaagccagttttgtggttcttctccactgaactattgatagatttgggttgccgatattgttgtttcagatatgaattgttgactgacattccagatcgcttcttttgcattttaacgtgagacattgtaatctggcccaaggcttggagggttatttttgatatttcttgtggtatgttcaacatgtctgggactgcttatgtgtgaggctggtttcaatatctcatattggtaattaaatattaatgcatacttccattgcccgtatagtcgatcatgaggttttggggcgagaaacatcataccataaatatacagaattagagtcgacaggtcagtacaaagccacaggtatcggtagaaaccccgctgggacagctcatggtggactcgaagtggccaaaccgccggaggaaagccaccaattccaagcacccacacgatctcttcatagggctcctatatggcgattttagtgtgagagccacagtcctcgctgatgctattggccgcactggcaggcgaaactgcttcatcggccaagactgcctcgtaagacatagtggacgctaaggttaggtcccggggtgggacacttgcggccggacttgacgacacaccgcacgacaagaataaaacctgcggcgtcgaggctggcgagtcaatggacatgggtgtatatatagcatctgtgtggcttgggcggtggttttctccgtgactaaattgaacttccggtgattcgttagatggagcaggtttttcgacttcgggagtttgacatacctatctcttcttcaactgccttaccgctatggagctcgagttcgcaggcctgcggtgacagagcaaatttcaccttcagtcgcggtgggtcaacaaatcggtctgcttgcgagtacactccgatgggaattgtcacttgtaccgacgagtgttgggttggagatttgaggcatgactttgtcacagaagtgtgtagaattgcatctgcagaaacatggctattgtatcttggagatgtagactcaaaacatgacccgtcttgactcagccctgtggtatcaatatccacatccgaatccgtagagatacaggagctaggatatgggtccgtttcgtcgcagctctctaggtgcagctgctcgaattcgacagtcagggtatgacggatatagatccgctggaggtgagattcaacatccttttcctccagggcaatgatggttgggggccgtctgatcatgtttccagggatgaatgatgatcagtcgcacgaaagccctggagcctggaggtcccgtatatagaaacatcgtgtcttaggaagtcacgtatcttcacaatccaagaaacctcgaccaggatatgcggccgagaagatattgcaatcgcgaatgcggcgtagtccctaaatagtgaatcagcaaatgcgatagatgcctagatgatataaatcctatcaatccctgaatctgtgcaatataaatggtgtaaatgtatcccatcgactcgaaactggacaaatcagacatacccattccatctcaccactgaaagggattaaaataacatacagatatctttttttgtactctgaatctctctctccccctctaattctctagggaaagccctggagggaatattaatagtcaagtcaggctcagcccctcgacactagacccaatttctacggagcctcctgttgatccttccccctctctccagcgtcgactctctcacacacacacacatacacctctctctttcccccaactattcctcggatcatgcatccgctgcgtttccgatagcctgtctttcattgaccttttcgaccttgcttcccctgaatacctcggcacatctccggtcgctgccaaacctcaaatctccgccatgaacggagatctcagcctgtcccagactctgggagggcttcggatagccaatccagacgattcgcctcccccaacggaggatgcgaccggtgggtcaacagactctaatccgttcggagcgccggacggttcggtatcaacacaacacaatcccgcacatgacgaacacacctctgcctttcctcctgcaaccatcgaagtcccggtgacagacgaccgtcagacttcattccttcaatcctcccccgagataacaccacaatcaaacacatatcagccctattcggctccatccctctcaacgcctccgaatcccaaccgacccctttcctccgtatacgtgaatggctcagcaacctcggtcctccaccgtgagaattcatatcgcatccgaacagattcgggtgcttcatccaaatctgggtctcaggcgcgcttagacacacgaggaggctcgtcggcattacatgccggtgtgctggcgcgcgacaactcccacagcgaccgatcctaccggaccgcgcagattccgggcaacggcccggcggtgatgcgtcagtcatctcgatcacaagcaagaagtggcggcgcatctcagatgccacgaacggcttacatgccagaaaacggcccaatggcgagtagcgaggattggcaagaccgtggcgccgcggtctctgtgagaaaggaggtggatgccaacggccaaactgtctctcgctatatcaagaaaggcgttcgagacttctcgtttgggaatactctcggcgaaggctcctacagtacggtcgtcttcgcaacggaccggcagactttgaaggaatacgcgattaagatccttgacaagcgacacattatcaaggagaggaaagttaaatacgtgaacatcgagaaagatacactcaaccgcctgaccgaccacccgggtatcgtgcggctatattataccttccaggatgagcagtcattatatttcgtgctggacttgtgcaaaggaggagaattgctcggtgttctcaaacggatgaccacatttgacgaggagtgtacaagattctacagcgcccagattcttgacacgatagactacatgcacaagcgcggtgtcatccaccgagacctgaaacccgaaaatgtgttgcttgacagcgggatgcatatcaagatcaccgatttcgggacggcaaagatcctcaagactccacgagttgatcccagttcaaatggcattcttcctcttgactcggccgagcttacacaggaagagcgggcgagctctttcgtcggcactgcggagtatgtcagccccgagttgttgacggacaaaaatgcatgtaaagccagcgacctttgggctttcggctgtattatctaccagctcttggccggtcgtccaccgttcaaggctgggaatgagtaccagaccttccagaaaattgtggcactcgactacgaattcccaattggatttcctactgttgcgcgtgatcttgtcgaacgtcttctcgtcctagagcctacccgacgtcttcagatcgaacacatcaaaaatcatgaattctttgacggtatcacatggggtccagatctatggaaacagaaggcaccccgcttgaaggcctatgtaccccccgcgcgcgatcccatcaagcttaatgacagtaaaaacggggagagtctccctccagtcatctccactgcaccctcgaatgcaaatgccagttcccgtcaccttccacgagtggtaaccgagctacccccgccgagtcagctcgatatcgaatggtcaccagtactgaacaaatccaacgagcggatcttaaaattgggtaatttggttgttctgtcttcggctgcctcgcacagtccgtcgtccaagaacagtagtggcgagtttgatgcaccccggaagttctctcgtttcttctcaggaagcgccacaaagaaacgacagcggttggtgatggtcacatcatccgggcgaatcattctggccgcatcaggtggtgatgataagaagataaagctcgagattcccctgcttgctccggggacaagttacagaagtacgacggattctaaaggaatttcatcctggattgtggacacggtatgtacttcatcctttatcggtcaaaatgacatatctaacgacaccccacagagagagaaacattatgttttcgaggatcccaagccatccgcaagcaacgccggcgccacggcgatccaggtacaagaatggctggacgcattggacaggtctcgggagatgtcacaggaacaaagcgcaggcttctccgacgatgcattccgcgacctttcctctgggttccctagtcccgccaatacgctagaccgcacatctgacatgcagaaagacgatagaggcccaccatcatctggtcggaatcacctagtgaaacagcaggccaccgatagcgagtcaacgaaaggaaggaaacgatttagcaagcgacattcgaagaatggtctcgctgcggtgttctaatgacatcgaataagaacgacacatattgcgatccatatatccacgtgccaattgcctttcggttttgtcggtttgataccgactttcttatactacctgccttcgcacctcgctatctcaccatttgaacacacctccacctgtctccccgcgtctctttttttcatttctcttcccatgcacgggcattcgcacaaagatgggttatcatctcagcgtatcggttatcctaccctttgcatattccagtgacaagcgtgttcttctgtttgtttgtgttctttgctggggaaacatgtttcttgcatttagatctggaaaggagcgcatactttttttctttgcctgactgcctatttcagacagaataccgattttcctttcccttgtcgtttgctatgtcttccgctgttatatatccctgatttggcctgaagcatcacaacatcgagcctttttctgttcggctattttcatttctttgttgttcctggtgagttatcaggctttattgaggctgacttattgattatctttgaaaaatatgaaatcaagactgatacgcccgcgtcctcattcccctcctcattttcttatacctcttggtgtgttgttttagggcaaatttgcacaaaagaatactttccttgcttcgatatcgtcatatctctccttgtgtctcttgttttccttggtccccaggttccttacagtggcatcttggtttggccgcattttcattgtgattttcttgctcgcttcattcctcttcgaattccatcctttgtctcccctcttagtattttctttgctctaggctgagagatgatatacccgattttcctattccgaaatcattattcaaccgtcttgctacaattcttatatatgttgaaatccataatgaaatactgcgcattccaagcagagtgatcttgaacaatgtacagtttgatagataactatatacaactaaggagacaaactagatacaagtagacatcagtcataagcgggagacccgtggacatcgtcccccagattagatgaacagccagtcgaggcttgtatgatctagctcctcaatccagtcaaactcaagatcagaatcattattatcataaccattctgatgctcacggcgcttgagatcctgtttctgccacatcagacgcaggacccacgcagcattgcggacattaacactcgtcatggcctcatagagtgaaccgagcttttcaaggataagagcccgctgcgaagggcgacactccgcgccagcaatgaaggtgggccagatgagacatttgaagtgggagtccgaagggggaatgagggagatttgggtgatgagatttgtggcgatgagtctatggtcgggtgggaggccgacatctatccatggaggcgagaagccttctctggtgcgcgagagaacacggcttgtgtagaggtagacggcgtcttggtatgaggttgcgagtgcgagacggtaggttaagtttgggatgaagaagacattttgcatctcttggctccatgctaccgggtcgaagtcgcggattccttggaggaggctggcgaatgagtctagggtgaggggctgaccaggttggattggggttggcagcgctgttggttggggggtcatggcggcggcttcggattctggataccagagggcgtggacgaagaaaatcactcccaggagataggcgggacatccgacccaagaattttcctcgaggcgcttgaggatctctgggcccatggatgaggagtagaagggctttgagagcgcgcctggccgagcgagcgttgatcccatgatttccattctgtatggtcagcaagaactcttcgctataggcagagacccgaagcttacattaaacacccgtcaagggcaaaaacgtcgaggtcatcgagaattccttgtcccgggccactttcagggcggtccttgagaagcttcttcgcaccctcgatatgataactccaggccccgctgccggactcgaatatgtctatgaaggcaagcaatacgatagcagctaaggtcctgccgtccttctgcatcgccgggttgaggagatccatggataattggcgaagggcgcggtgcttgtactccaagaaatgatgataggcctgcgaagcgggttttcgagaacttgccggtgcaacaatatcttcaatctcctttactgacattgatagattgcctgatgaccatggtaggacagatgagtccgattctgatacaagggagcaatgaagagccccaagagcagcgatgctgctggcaagaacaggagaatgattgaccaatgcagtaagatctcggaacggatttttgtgttgggagtaaagggcgaagtcattaaccatatattgattgtcttacaagtaatcgtcagtggagccacagataatgcactggggaattctcacagtgatgtacatagtaccttgagaactgactgagatctttgagcagtggatctaccagtccccatggcgttggagtatagtcagcgggaggagcgccccgaggaacatgaacaactgcggtgtcctgttcctcgtgtgtattgacctccaagtgcgcaatttctcccccgaatgttggattttccgtctcaaaagtccatccatcggtctccggactaggctgtttcccagagctgtgcgattcggcatcggacgaggattcggggatagagaaaaagccgaacccgctgctcgctgcagtcgaatcatatatatgcgtagctggctggcgctttggcttgctaggcggtattcccacgtcatcaaagctgcggcccatcatctttcctcgactagccacaccacccttgacccaaacaagcggtttctgataccccagacattccttccccgcatctcgacacttccgacaggtgggttggccattgtcgcagataatgcgacgtcgtcgacaggtatagcagcctttggtcattctctgggcgttgtgagacaaacgtattttctgaactgggtagcgaagaactgagccacttgtgaagtttgttcagcgccactctccatcatcggtaatggtcaggattcggaggcaggatgtcgacaaagccacacgaccatttctagtcgtttaggaagtgactctggcgtcgacaaatgtcataaaccaagttgtcaatccgtcatgctccacgatctcttggatggttcagagaagcttccaaaatttgcggggaggatgactaagataatcttccgacgatcgagaccaggactgttcaagcttcttgcatctcaaccttctacttgctcttccatatcagttacacctgaaagctcatggtcgaatgctagaagaactacaagatggttttgaatctcttgttccgaagtctggaggtaagtgctttcgccttcgccactccgatcttcactgacattgttcgaacttagatctggctcactgtccgagtacgttgctccaatattgatgtatttttgcttgagcttgcattctaatacgatctacacagctccttcgaagtccgatcttccatcgtatggtgggccgagttcaccagaaagttcaacatattaggtacggggtgcctccggaggagcagggaggcactcatctcgagggacaaggtatgcctggtacaaatatttggtgacatagtgtggctgacctgttctgattagatatgaagtacaaaaaattccttgagcatttcaaggaagagctgaaggaccagatgaaaggaaacccgcggaacaaattttaataccccggcgcttgtatgatacgaaaactgatgatacccacatgaaaccgatacatattatatgctttgcttttaccttccgaaaatctggatttgtgcttcctatcatcattttgacccttgtgtcgacaccgggtatacagtgggatacactttcgcactccttgggttgcatcccttgtttaatccggagaatgaacttgatttgaatcattgacttgccccttctactattcccggctgtatttgcagtcaggctgggatccaataactggggcatatatatcgagtttcgggattgctctgaaggatgcgctgcagtaaccttggctacagacgcaatcaagattcgtcgaattgctatatttacatgtatatattgttgctaatttcgtgctactgaatcaatcagcaaagcagattccagcgtgtctatttcttcaaaaaatatgagaaaaagtacagtcgcgatgaatatcactttgaaccattcttattagtctaaatgactcgccgaataccaatgcaagccgatcatgctgaagccgaacccttcctcggtcttggggtcacttttcggtgattcacatccagtcgtctcctcataactcgaactcgggccagctcaagtgaattcttcactctagccagaacacgtcgaaggacaattggtctggcaggcctccagaagaccttctgtatttcccgggggctggtccgcatgaatatgacctcaaccacctgcagctttccgtctctcgggctcaggctcggactctgaattcgtttctcttttttttcgatgttggtaaatgcaacgaacttgcgtctaccaatttgctcggtgtgtagccattccagctgattttcattgccgaagaaggtcacggagagcatatttccaatgatgttcaaataattctcggtgtcgtactcattggagatatcggcattggaatccatgttgttcttgatttttctgtcggatagactagttcacgttagtattcgttgcaaacttaaggtggggtacagatcagttgggatggtactcactgggcgacaacgtgtgtaatattcgagagattgtaatccttgaatttgctttcgtatcgaacgtcgagggcgggaagcgaggttgtgatatcttcgggagaagagtgtatatcggccatgtttcttttgagttgggtagacggagtgtggaatagagtcgtatggcatacgctaattttggatgtgctaaaagctctaaatgtcgaatgaacgctgaatttgctgcagatatgctcagtggagctgttatatgcaaggttagtgaagtcaagttgaaataccagacaagaagaatatatttatattgagagctcccgaggagcaaaaggaacaacaaagagagactagattcatagtgaaatgaataaagaaatcataggtctggaaacagatcaagtcgcactatttccatctcactgcatggctattatgggatatttgccctttgtcgcccttggcgaggaacgagagctgccacttgttttgagcataaagaaagatccaaatataaggctgctatacttttcaattatgcagcgctacaagacggagtcttgaagtagaggctccgctttgtattacccctttgttgtcaagacttcaaacagcttcttgtcgatcgctcggctctcgagatgctaggtgaaggaattctttgcatctataatgatgaggtctcggtataatgaatcagcggtagcttttgctaatctcatagggggaatgttgggtatcagaagcatctcgacatctccaaataccctcaagagccgggaccatcatgtcgccaatttgacacatagtgaaggaatactccattcaactactccgtacttaagattagagctacgtatatgcggggacatcgaataaggggaagattcgtagtcagtcagtcagtcagaagtaatagtcgactacttcattgaactaattttacttactccgcacattagcctcaaatctacgcagtgaatgcgaaacgtttgaggtcaaccggtctgttaacgcttgtcggaacgggcatcgatacatcgccgctcatcctagggcaagagtgaaagaaaaacccttctacaacttgcattaccgaggtcttcccgaggtcttcccaacatgtctgacctgaacaacaaataagcagcccttaagtggttccagaagaggccggaaccccgaaattcaggctgtcagcggcacgccacatggaccaattggggttaggcgcaaaggactccagtttccaggtcaactccggctgtgtcggctttgtaaaattaagagtcgaaagggggtccaggtactcgagggattcgtgctacctgacacagcacggaaatccctgcaggctaggtatttcgcaggaagatgacaaccgttgattaggcgactagtggtgacagggtggtattgatgcaagatgtcatacggcggcttgatgaatgccaatgatatgtggaagatcagaggcagatcatgggagatgtgctaaatatggagggggcaagcgggaagcgaggggtacgtcgtcagacctgttccacatgttagattcctctttggtggtatatacaacataggttttgaggtcattctgcttattcacttattcgctgaattctctaactatggtctcatatgtattcgactgtgaaaaaaaccaaatctaaaataaaacatttgcacccacgggacaaacgtctgcgcgacccagtcgactccgtaccgtgtttcctattgcaggatcggccaatcagcggcgcaggtgcctcggcgcgtggatctggtctgagactagggcggccccattcggcctagctccctttcaaagttcgggacaaacacagcccaaaggctgccttttcgctttgactcctttttcattttcctgcatatccgacctcttttatcaatttcttgacttcgggtcaagtcctttcgttctgatactcacactcgttatccccaaccatgcgtctctccagcctctcgctcttcgtccaggctctgctgttgactgcggtcgcagcccagagtgggattgtttccaatgtcgtgtcggatctcacaactgagtccacttcatccacctctgatgccccgaaaacaacatcgaccgctgaatcaacttccacaacctcggaagagacttctacaacggacccaactacttccgccgagcctactagcaccccgacttctaccacctccaccgagagtaccactagcgctgatcctaccacttcgaccacttcgaccactgctcctacggctgatcctaccaccgattctaccaccgctcctactaccgctgctaccacctcagcagagccctcctccacagcggaggctaccgtcccttcaaccacttccaccgctgattccacctccacgtcgagtactggaggcgatagcaccacttctcagagcaccactaccacccagaccccggtcgtgaagaccaccacctcctacgcgaccagcgatggatccaccatcgccaatgtagtgaccaccacttccacccccgttgcttctccctctcttaacggcgacaagagctccggctctagcggtgtgtctgcttcggacaagaagatcatcatcggtgtcgtggtgggtgtcggcggtgccatcctgatcggtgccctgggcttggtcttctggagaatccacaagaagcgcaatgagcgctacggcgatgaggacgatctgatgggtggcaccgctgtgggctccggtccccgcgaaaaggcccccagcccagccggcaacacccccttcaagaacacactagaccagtaccacaaccctggtcccgtcaacgcggcgtctaacttctaggtctgcgttgactcgacacttgtcgaagtgtaaatcttgtacgatcttcatgcttttctcaggcgctatggacagggtatgcgagttcacggttgcgttcttcggttgccaaattgcttctcttttttttttttgggcgtttgacaccccactccattcattctagattgaatatctgcgcatttttgagcgtttttgtttcggcaaccaccacattccttttctcgcgatcgcgactctcgatccctgcgtgactgacaaaaatgcggcactacttttccgttctgcctgttgttctattttttgattccccgtatctaagcaattagtttcgtcctatgacgaacctccattgtgccttgaccaatattttatccatttaccttttgcagcatcggacgtcacaagttgtatagtgttgatagacgtgtgctgcaaaggtcccttctatcttgatctgtatgtatgtaattcaaggcaaatgaaaccaaccagtgaacccattcaaagtattatatgtcaactagtccataggcatcgatcaatccatgccgattaacatccgcgttgttccggaatgcgagatgttctcagattatactctagagagagttattcagttgttgatggtaaaagacaatgtaagaaacattaaggtcaacggacaagggtattgttgaagcagaagctctataaggcgagtacaatggttgcatgaggatcactgccagtttagagataatcagcatttgggttgccaaccctagcgactaaggaaggtttgaagcaaaaccagtgtggacttcctatttagtgtaagtttcgactatctacgctagatcagccgggtaaactatagagatagcacgatctatgtacggggtacatggtatctcatcttccccgcatctaatctaccatgaggcgttcaacgggtataaccgccaagagatatgcgcccgctgccaagaaatccgctacaaccgcaatatggccttgcgaaattattgttcaaccagccaagcaggcaaagtatagggaggagatcctaaaataaagaccccaaatcaagcaagaatctaaacaattataaatgatgtcattgaggcgcccagctgtggacttacggtcaccctgggcataagctgactcgaaggaagcgtataatgaagtccttcagctggtgtgggatacataagtttctcctccgtaatatcatactggactgatccccctataatagataagcagatccagctcatctttcaatatatcaaagaaacgattcagctcacccttgcactctttctattggttgcttccgcccttgcaaaggattgcaagctcccctctagccttgaaggttgtgacaagctctcgtgtcctgataaatgtctcggtaatcgctggacagtgggggacaatattgtcattggaatcagactatcgcatcccgatgttccctcgtccttcgaggaacctttgcattgctgtggatatcatattggatggattgtttgaaataggcaaactgtgttaagtgttattaactggttcattgtcgaatatctagtattcaaatcaaatcgtgaatcatgatgtatgggccccggccccttacactccggagtagaacgcgctaaattagcgcgactgtcccaacaaggactttatctctccatcagacctctacaacatacggagcaagaatttaccttgttcactctcgagtctcaatcaacaccatatacctacatagtagccctggaactaaaccccaatcttggaaaccacaagaaccaaccgacgcatccgacttccgcatccgacccacggatacgccagaaacccatcaccaaccccataaccatccaccatccacattatcacaatgttcgcaacacaatccccccaaacccccttccgccaatcccactacaccccaacccgctcctccccactccgcaagcacagcaccacccctccaccgtggaccatgtccccgacgcgcaacacccaaggcgcgtcgcaaaacaccgcaccaaacccattcagcaacccgccaccgaccttcaacatccaaaccgagccaatcgcccgacacacgcaaaaccaccaatccccaatcccagtgcacttcaacgcgtccgcctcagcctcaacaacaccaacctcagcaaacccattcctcatccacacccaaacacccacctcgccgtcctccccaacccgccagaaaccaaagtacgaagcacgctacgcttctacgattgcgaacccgcttcagggtgcggcgggtctggcgcgcgcgaaaacacggaagatgttccttaatcgcgtgcgccatgaacgtgacgatggacgctttgaggcgcgcggggagcagatgatgcgtatggagcatcttgctgatcggaggaggtgggaggagagtatggcgagagatggggatgctgttgttgggttcgaggaggaggtggatgaggatgatatgcttcccggtatgttttttcccctggtttcattaggtttgatttgtggatatatgtatgcattgaagatagggtggacatgatgaacggcatctgctaacgttctggttttggtagatgatgctgatgcccttgatgagtttatatctcaggaggaggctatggagatggctctttgggagacgcagaggggtgttcctgggagggttgaggagttacagtctaatgggaccggtgttccatttagtgatgatgagtatgatgatatctttatggcattgtcggagcctcaagggggtcagtctcagtctcaggatatggatatgtcgtgagcgggctagagctaagggttaagtgttgattttcttttgcgaggcattgcattgggtggcgttttcggtccatttgggcgagatccgggtatgtacataaactaaacaagggtatatcgacgtgggttgcgcatgagacggacgatgtatgagtgatgggaaaaaagcaaaccttggcatcaaggcgatatcttcctttcaagcttcgatcatacattttcaagatcatatcactgctgtgggcaatcaggcactccgccagctccacccatcgcacctcccaagtcctccatgaggggattcgaaactagttcatcaggcgggcttcccgccgcttgcatctggagacatagtcagtaaatgaaagaaccaagatatctcgattcaaatatagtaaactcacctcttgcattttctcccacacatactctcgacacttgggatcatcatccgagaaccccttctcctcaaacttccccacaatctgcttgacaacccgcgcctgcgtctcaaaccgctccatatcctcagccgaaaccttgccactgtttttattcttctcaatccacggcccgaacttgacgtccaattccttcatcggctcatacagcatctccttgttggacagctgctccatcatacccaggaacattttcgacaggtctccgtcttcgccagcacccgatgcccccgcctcaaccgccttaagcagctgtgctagcatatcatctgaaatatcgtcttcattacttaccgcggcggtagctttatcaccactttccttcatgcggcccattgtgcgcttgatagcgtcgttgaacgagtcggcggcttgctctgcgcctacgcctgtgcctgcagttgccgtaccagaggagctctgagtgccaggagcagcgatgccagccgcggctgcagctgccgcaaaagtctctgccgaagctccagctccagaaccgccctcctcggccatcacgtcggcgaggagctgcttgaggaaatcacctggcgggatcccgctctcttcgagctgtttagcaaatacatcagcgccttggtcgacagttgcttggaagttgggatctaagctgctcccggcggccgcgcctggtcccatcatgctcgccatctcttgttcgagttgcttgaggaaggcatcttcgtcgaagtctgtgggtgagggatccgagttggtgatggcagagggtgcgggtgggtttgcaggaggggcgggtttgggtttgttgaagtcatcgaggacgtctgtaggtatgagtatctgttcaccctggagcggtgcgggggagcgggggcggggtgaagaagagaggcgggtatgtgttaccatctagctcatcgaattccgagtcttcgtcgtcatctgcagccgctttctgcgattgtgctagtactggtgcgggttcagatgcaggtgcaggtgctggtgcgacgttggtttgtggcgcgggctgagattcctgtgtggttgcggtgggagcctcttcggggcggtcctcggtgggcaaggaggtagccatattgcgcaagaagaataacctaagcaagtatgatctcaattgaaaatatggcccggtcggagttaagcttaactttgaggtaaaaagaaagtctggagatgaggttgacatgtgacgggtgtttggcggggtgccgatcgccgaggtttctatgtattttgccagtcctacataggcaatgttgtgtactactatagtatagtcaactatatgatttagaagtgaggatattgatttactttcaaagtcaaagtcaccgttctctatattgctataaggcagatctaatcgagatcgccaaactctgtccatgtacaaagtaccggcatatagaataagatctagttcactactgcatacctagttagcatctccaaattgtacgtaaacaaccttctccgcatcttcccatgagatcatccagaatatccagtccttggcataccaccccccgcataatttcaaccaggttgttccatgcgagaaaaatctgcaaggcattccaagtccggggaaggtgcgtcatcccacgatgatcgcccattggtccccgagggaaaccagtcgggcgcctgattcgcttccaggtgccccaatgggtcagggtcgtaagatcatgtggcttctggatagggcggaagacaccgaagctcccatagcggttataaatgggatgatctggtatgccggtatcggctatacgggtttgcgcatgacatgcattcaaggttctggggcaatgttctcaatcattctcaatgtgttgcaacttgcaggcagtttgcaagtacaagctgcaaatgcaatatacaatattgaatatactcgtctttttaattactccgtacagcataccgtggaactgaaacacccccccaccacacaaccttggtggatcatacatccgagaataaggccattcaactaaacgtggaaccacccaaaaaaagccttttcttcccaatccagttagaaggtggaaaaaaagaagaaaaaggaaggcgagaagaaaagaaaaagaaaaaaacgaaaaagtcaaagagtccaacctgggcaggtacgcgagagcccctcctgaccggacagaatttttctttcttttagtcaattgttttacacaggtattttttgtttcctcttttatctcaattcctctgactctttctttctcataattcggttttctttatgtcacaacttgaactccctctatctcgcacgtcccttctgagttagccgcgcgtgtgtgtctctctctttccccttttatcctttttatcctttttctttttttcttttttctttttcttttttctctcttttttgccggccagcaggtccggcaacgcggggaaaactggctgtgtctgttccgtgtgcggagggccgcctacaggcttgaattagattatataatggtctcgatggttgaccatagtgatatggtcatggactcaatcgcgcctaaacatgaacccggtcctgatggctccatcagttccgccgtctcaacaccagatccggaagccgaacccttgacccaggatgccgcgcagactcagaagaggaagggaggcaggaaacctgtacgtaacatcttcaacctggggggccccgcattcctcctttgtgtcacagtcttatctcctttgcattgtatactaaccccccttcagatatatgccacctccgaagagcgaaagcagcgcaacagacaggcccaggcggccttccgagaacgcaggacggagtatatccgtcagctagagaccaccatcaagcgcaatgaggaatctctgcagagtctgcagcagagccatcgcagcgccgccgatgaatgtctaatgctgcggtataagaactccctgctggagcgcatcctccttgagaaaggtaccccttaccctgaacctccggtccaaacttcaactaactcccaacccctttatccaggcatcgatgtacaagccgaactacgtctgaaaacaggggcgccgggcgcccctctcaaggcaaaccctatgcccccaaaggcacctaatgtggcagggggccgcccgaaccagcgacaccctgcaggtatcgcctcgaagcccgaggcgttcggcatgtcacagcgggaaggcgcatacgggatcccgtcaccgcagttccaagcaacaccgacctcccacgtttcatcgccctcgcacgccaagtcccccggtttcggcttccagggcgccatgtcacctgtcgaggccggacggccccagcttctcccccaaccccggtctttcggtcagagttcgccgccggcaatcagtatgccgcacaacgaaccgtcagaccccaaggctcaatcccgtgggggagctatggggccccgcggtgcgcgggtcgcagcggctgcttactatccttctccattccagaaacactacgatcagctcggtaagcctctctttgactttgttacttagttcttccccggctgacctttcaagcagagcaagagtacgatgcccaggccgatatggtcgacgatgaccacgatggctcagcatcttatgtccctgggtacaccccgcagtccgtcgcctcgggctcccacatgtccggtttcaaccaaccaccaggcgagggcacacccagcgatttcggcaatgcaaaccagctcctcggccagtacgagccgatgatggacacagatccgtttgggttaagcgctagcatgcacttccccacaccgttcaattacgagcacaacaactcgagacaataaactaaatttgtctacatccttctctcttattctcttgttctatattcatatatccgtccatcttatgtggcaaatgaccatctcttccctaaaagtttgatttgagcattctccggcgttgtgagggttttgataccaatgttctcccctggtcttctcagaggtatattatgttacattttgtacatgaatcgaatctttccatcacggcagtcagcaaatgtaacttacattgcatatttccaatctactaaaccttcaacgctctaggatcaatgatactcgtatccctagtaagccccgcaacggtctttaaaatctctttacgtcgcaaactcgcctgcgttgcagtgaagctctatattcatcttccaggatatagaagatattatagttactactgatttatgatgtgccctgtgtctgctggaggactctttgcccgaggccaattggcttagcaccattctcatttttgtatcagatactacatacgctgcaaaaaatacgatgtgaaagtccctgagttaacccataaggcactttggatattctaatcatgctacttgtaggcgagctagagggaatatctagcttgctactatggagttaagtaaacagttatgtccgagttgtacatggttctttactcgatggctcaatctatcaaacgtcatgacatcgctttctgtatagctttcatcatattccattgcattcttcaagcaagttgtatacatttgtactagggaatccctaattcccctggctttcaccttctacattttaagtttcgtcaacctcattcccgatcctttacactctctcgtatatcatgacattcatttgtactatgcacgtcttcgtacctaaggacaccgacttcactggcagagcagttgtcaacgagcccatagccgccgttcacacggtcacaggccttgcctgctccgacgaagctgccgctgccttggcagcgaaagaccttagagtactccgaggttctttccgagacctcgagatcatcaagcaaggagccagtgagacagatggtttaatcaaccttgcattcgatcacgacttcagcaagtatgcgtagagctgccttgatgagaaagagaccatcgaaactataagctcggtcctgataggaaccaacaatcctctcatcaccacctctagcaccttggggctcaagctattgctgaagctattggtcaaagtacaaggtctccctgctatatcaaaacctcttgacgaagcgggaagtcttaacagcttcatgtcttttgttatgaacattgataactcgacttcatgcagaaagacccaggaactccttcgctggagccacttgccggaagcttttggatggtatcaacgccgggtttatgcacagaattgaggagttgtctttcgcaacttttggggttgggcatatatcaggaccgaaatgcatacccaaggggagaaacaaggaccaatgcgattgccagccaaatgatgcagcaatccccacccccacatgtcaacttaaatccaaacttatccatcctacctgtgctatggatagctcggtgattacatagcttcgcaaggctgggagtacgcaggtgttgtccacaagtcagatcgacatactccaccgggacatgtccgctctgtggaagctaatcaatgcattaccatttgatatacacacatagtatcatatacagaaagggtgaatatagtacgtccaacaacgaataaacccaggtatactccccagagcagcccttgatgtaacgattacgtaaggtaccctaagccctagactgcgggcagccaatcagcaaccgcgggcatattcgcttaggaacagaagccgcctttcctgattagtcaccttacaccctgcaaccacaaaccgaggacctctcttcaccctgctcattcatcatcatcaatcttgacaggccggattcccttgggttctgccttgtgccccgttaactcctctagaccgattgtctaaagttgagcgcctccctccggaaggtctccgaaacacaacaggcgtcatggcggacgtccggtccaaggtacgctgaattggagctttcctgcgcgctgctagtgatgcaatgctatatgaatcgcgatctggaagcgatttgcggggttcaacggatttttttttatgttcattaactaattcgaattgtttcttctaatatagaacctctacgagcttctgggtaaatttcccctcccttgaatacaattctcggctatcttttccgacgacaatgagcttttttcctattccgaacaatccagctctattcgcatccgttcttcggccgactgatcgctaactttgcctatcaccaggtaacgacccagagctcgaccccagcagacccgctcctccccccaccaaggctatcgaccgccccgttgaccgatccggaaagcgtgatgcccccaaggagcaacctgctcgtcacaatgaggccaacgctcgccgtggtggccgtgtgaccgctggcaacgaggccggtatgtggttataagaatcgggttgacggaataattggactaataaatggacagcttaccgtgaccgcaacgctggccgtaaccacaaccgtgagaagcccactgacgaggctgctgctcagcccgcccgccgtggtggccgtagcggccgcggtgaccgccagtcccgcactggccagacgtaagcgatccctcgaatgaacgaatcaacccgaaaggaaaatcatgagaaccatgagatttcgtgaggaattatacaagagtgaccaaactaacccgaattatacagcgacacccgcaagcaggtccagcagggctggggtgccgatagcggcgagaagaccttggacgatgagcgccaaggcgagaagatcgctaagaaggaggagaacgagccccagacccccgttgaggccgaggagcaggaggagcccgacaactccaagtctttcgccgactaccttgccgagaaggcccagcgcgagaccctcgccgccaagcccgagcgcaccgccaacgagggcaccaagctcgacaagaagtgggctaacgccaaggagctcgccaaggaggaggaaccctcctacatccagccctcccaggagaaggccaagcgcgagaagcagcgcaaggagaagaacttccttgacgttgacctccgctacgtcgagcctccccgcagcggccccgctccccgcggccgtggcgaccgtgccccccgtggtgaccgccctgcccgtggtggtgagcgcagcgagcgtggccgtggtggcccccgtggcggcgaccgtgccccccgcggtgaccgccctgcccgtggcggtgctgctccccgtggcaacgcccgtggccctgccggccctaccgtcgacgagaagaacttccccagcctcggcggcaactaaattgcctgaccttgtcgggaactcgtgctcccaggcacggatattctttatcttcccgactctttcatcccttttctccatctgctaggtgtgcaagttcacccggaggtggtatttattgtgtcgcttcatctgtgatggtttctattttctctttcatggggattgggcttgaggggagtttgtgggatgtgagggattatccgtgctctgtggatgcaaaaactgcccagatttaagttttttcttttctcttgggaaaagacatattccgggttggtcttatatgtgttgtgtgtgtgtgtttacatttgccttcggtgagcaaacgcgaattggatgactgaattcgacgggcccatgtaatttgaatcgatccagaagaagtcaaccaaaaaaataggaacgcaaaatcttcaattgaattacgggacatgtctgcttcttatactttcaaagaattactatctcatagatctaccggtggggttgtacatccaacaggcaggtatacgcttttcgatgtatcgacgggcttgcataggaatagaccaaaatcggggttttatataaccttggatttacccaaggcgcagaagacttaaccctatctaggtatgtactaatgataagatagccaaagttgcaaaattcgggcccagaaacgagagacaaccgatttactgtgtcaacagcctctccatccacgacccctcgctgtgacgaaatgcaaacgtctacagctctccctcgccatggcggttctgccccgacatgtcgaattctttcgcggcagactcggcactctgggcccaaaccgccaaggtctcctcgtcgacttcgtcgaggaaagacaggccaggcatggcctttccaccacaggcacgttccaacgctaggaaagcaaaatggccaccaatgacaggccgagcaaagaagttcggaccagggaagcccccgtcaccctccgtgttgtgcaagtccgtcaatggacgatccgtggtggtctcattgacccagcgggcgacagaatcgaggatctctgtacgcacagccttagaggcgacagccattgagaagaattcccagtctgtcttggtgtacatgtggcggctgtcgaggggcaggccgtacttctgacgcacgtagtggtaccacacagactgcttctggtagatatgacgaggaacaaacccaggcgaatcggtatcggtaccctctagatggaagcagagctgggcatcggcgtagaggttgtagatcgtcgtccaagagccataccagtcgtaggcaagcttggcatgggaaccatctcgggacatgccaaacttttcccatttagtgatgtagtcacgggcgactttctgcgggtgtagttagtcaatctgtcaatgcacagataaaagacggctcgtaccttgaaatgggcagcgtcagcatcgtgaccagctacctcggcgatcttgctcatggcgttgatgcccacaattcccttgagagccaaattggtctgcagagccagccaacctgcaaagtcatcggttgagactgttctcaaaattagcttgcatgaacatactatcagaaaagacagagaaattgttcttacgctggttagcaggctcaagagagaactctaccagatatccggtccactgtttccaaaggctatagcttcgcttcacccatttctcagcttggtgctggcccttactaccgccaccccatttgctatcttggtgagcaatcccagacagtacctgtagattgccaagagggaagagtccagaagtctcgccttcagagcttgacgagggcaatccctgtgttgaccaaatggacgaggccgcggtagggtcttcatagcggagcgagttcacaatagccaaacccataatgaggatgttaccacactcttcaaccggcatgtactcgtccttcccgtcaggatgtccggtagcattggggaagtgtgtacccaaatcgtgcatcgcatacttattggggtattggccgctcagcatgtgctcgataagcggctccaaaaggtacgccagccatcgggggttcgtgtacaggaaaaaggggaacgcggggaagatgacatcgatggtttggaagttgccatttgaagagatctcctttaggaacaggatcgggtcgtccggagttcctgaaaatgtagttgcgcccatgacctgccgcgcactaagggcaacgatgtcaacatagtcatcagctcccgacaagtacgcgtcatctgccacttgctgcgagtaattggatgctagagaactagctgcagcgtagtccctgtagtggaaatccaggagctcctccgttgttgggtaccaagattcccacaagggtcgcatcatagtgagcccgcgagatgatgcatactgaacaacggggatttggataaaagcgagagtaaatgtgacgctgtcgttgtagattttagatgaatggcctaggtggaaagacttggagaacgcaaaaaccggcgctcggtcctgaatagcacggaatttatcatcgttggtgtttcgcagagttccagagctagcaaagacacggcgcacgtcaatcgcatctccagattggaatttagcactctgtattgtgattagctatagatcagttcattttgacaagatcggacttacagatggtccagtgaaatgaagagtgccccattccgcacggtcgcgaatctctgtgagaagaagctcgttctccctctgtacttgccattgattaagtgtaaggtcctcgtactcggttttcaagctatcccattcccatttgatcttgctaccagtatctccgctaacccagcggccgtcaacatccatatagatgctgacgtcgacatcaccttgcacatcgattgtgacataggaagccgggattgactgacgtaaagtcgaagttggagtaataggtgaaaggaatgagatagtaacgtctagagggtttccggtaccagtgtcaatgtggtaggttaggttggtcgttgaggcatcgtagttcaggccgaggtaattgggaaacttggtcttgtagctgtaatttgttagttcctaaacctttcatatatgagtaattttcgaattcataccctgatttattatccaaagactcatggggcttgcccagaagagggtagacggtattctggcttggaacgtgggccatcaacgaaagtcccacctcctccccagtatagaacataggccattttaaccaaggtgcatcccgagcatttgcgagccaagtactcagatatggatttcgtacgatcagggggatcacaggcggagtgagcgtagatgcggtgctaaccgatgcctggaagacagcggccaggaccacgagcgacagctgcatggtcacactctgggcgaaggtgacacagaattcggtccacgatacaatttatataacaataatagttggggttgtgtaacgaatgtactgaaaaagttgtagtaatgttggagaagaagaaaggttcaagggaggaagccgaatgcgggggaaggatcaaggatcaacataagtcattcctcggcttttgggaatagtgagatgggcttgaattgctctggtaattacggcttttcttttgtttaatcctatatcttctatacaatgcaattcaagtcagccctgaagagttctccttttcatcccccgatgatgtcatgcggagacagtactatctaatcacagagagaaacatgcatactatgcctattccggataatatatgtacagtatagtataggttcattgaattgtaaaacatgggcagagatcagtcaagagtagtagtggtaggtttgaaaaaaaaaacgatgttatccgcgatctatactggaatgaaggactgaaaccaccaacatccaccctcatgagtactgtgtcctattctgtctgcatattcattaaggacatgggaaatggtttgattgggaaagcaagttcaggtcattgccatatctcaggtgttgttaatattgtctgtcttgcatggttatatagttgctataaatagttattcctattagaaacgacattgggtcagttgtaggtgtcttatgttatgtatagccgacaggctatggagaggtttctattaggcagaatggaattcctaagagtctaatactatgtaaacttatcgaacaagcaagaagcaccatagggcagcatcgggtactccgtatatcgttgagacgtgacaatatgtagactaataaaccaagattacctacgacatccctgtaacttacgggtggtagcatatagaaaaggaacaaaatgaggctagtcatgcacctagatgcatggattctataatattgttggtcacaaaggcattgttcctcatgatatacctctgccatgggctattctctttcttcaagatgattatactactacatagatattgtccatcctgatccccgcaatcttgttcttaagcgaaagtatttcaaataatatcaccttttctgtttttctcttataatttaatcttagaccgcgtccgtggggtctctaacccttgtggatccaggacacgaaaagcactagacgcgcccaggctaggattgagaaattgatgtgtgacagtattataacccttaagaaagagtcctagaaaagtgaagtggaacaattgagacctgaaagacgtggaatcttcaatatcaaaaggttttataggggagcatcgagaaggaaggtcaattttatacgcgtttataggacaccagtctaaaacattctaaaccaagccattccacagtattaacagtatcaaaacacaattgcaatgtccaaatcgaaatgcaaacgcgttctcagacacgcctgtgtggagccccagtccgtgctctatacaaggctagtaagttatcgacctaaacgcgatcgacgcgaggaccgtttttcttttcccagttcgactttctacctacttcctactttctacttgctttctatatcttagcttcccacttaccaattgtgataaccctggaagttgcagttctctttacatatcgtattggttcgcgtcagacttccccgcagcacttccggattctaccatctcaaccttctattcccctcaatactccctcggactcacctgtgcactattcgaaagctatataatgaattcaacttcggtgcaattcagtcctctcaaggacggacgacaaattctcggcgagagagactcaaacgcgtgtctgccccccgccacacacgccaaaccgtcattcccgaccattgggaccccggtcaggcggatgccaattgctacctcacctaagaagctcctcccctctcctatatttgcaggccaaaaacggacacgggatcaagtggatgacaggggagaacttctcggacacgtgcaggcgcgggaatcctctccgcagctcggcgtccaatccaccgtaaaagatgatatgcaaagccaggtaagcccatgcgagacagacaaagaagtcccgggaatgaccagtccaaagctaacactgtaacgcgcgaatgatagctcatccaaaccccgacaccacaaaactcacaatctgaatgcggccaaacacaagatctaatggacatcgatcgatctttcaatgtgcctagcacccccgagcaagacatgcatagcgttaccttagactccgacgcgcgcaaaaagttcatccaacaagtatgcgagccatgatctcagtatcaaacaccttccccagcgggcagtttctaacaattgaacagaaagcaagccttctccgatcaagactacagagcgcgatgcgcaatgtgacagaccaccaatttgaccgccgggtctctgagctagaagcacacagtcgtaaatgcccacggctctcactctccgtcctcgccacgccacccctctcatcgcgcaaacaattcacatctttctcatcctcgcaaataaagacaccccgcatcggctgcgctggcttcatctccaccccctcccacagcacacccgatcttccaggccgaccttcgccattgtcttccagcgttgttcagcaacgcgcaaagtcacatgcccaacgaacaccgcctcgtgcgctcggctccccagtgcagctgagtagtcctccagctacggtcattcgccgtgaagccgatagggaaacaagcatgggcccaagagccgagcttatggatgatgtggatgctatgtcgccgtcacagcgaggcgacgcggtcgatgggctattgaaactcatgagtacgacaggcaatcaaagctcggatgcctggactggatgattcgaccgcgttttctttttttttgtgttttgtctatgctgtctgggctattgcttaccgtgtggagcatgcccgagtggattcagtcgcattacagtggataggagccattgccagagcaatgaattgcatgatgtatagggccatgacaaacatatcgaggtttgttgatatacaagtattggtccgaacatgacggggtaatcccattttggaagcatgcagcattattagaataattcgtctatatgttgcgatcaatgataccatttttgcatttgaacagtgattagttctcgtcctaattctagtatacagatttgaaaccaatagcagtgccacttcctaggcagtacataagactcatattatcaagtcattgaatgttacactacaagtcccaatccagaaaaagatcgctaaatatatcaattgattcaaggccgacagcatctatctaataacacgcccctcagcgaaccttcttcaacttattacgcttccgtccaaggatatcgcgaccctcatcaatctcacccgcagcctcacgcttcgcagcgccaacatccttgagcagactggttctaacaacacgactctcaatattgacaccttcctgcgcgaactcctccatctgcctaccaactcgctcctcaatggcaagaacgagctcgacatcacgctgtccaacaagcgtggtagcctcaccattccgtcccgcacgcgcagtacgaccaacacggtgtacatagtcatccggattccggggcacatcgaaattgataaccagctctacggacgggatatcaagaccacgcgatgcaacgtccgtagcaaccaagacacgggcagcggtggctcggaaacgagccaggttagctgtgcgctcggattgcgggaggatactgtgaagggatgtgatgcggtggccgaggcggcgaagagtgcgttctagcagatcgcatgtcttggtatggttgcagaagacgatgactggcttagtgacgtttatttcggtggaaagcagcgcgtgcaggaaggcctcgcggtgtgtcatgggaaccttcaggtatgtctgcttcagggttggcggaatcttgccttgattttcggtgccgatctcggtcatgaagatcggtggcttattgcctgcggccggcatagatttcagtgcccgcacttcggcggtcatggtcgccgtgaatagcagtgtttgacgttcggccgatggtggaagggctccgagacatgtttccacgtctggtagcatgcttcccggcccactggctagcaggcgatcggcttcatcgagaactaccattttgacgcggcggagaccggccactgtgtcgtctccggacgtcttgatgtgatcggcgagtcggccgggtgttgcgatgaccacgtgcggccggttcgcaagttcaatagcctgcttccgcatatccatgcctccaacgacgaggataggcttcatattttgcggcgcggaaacggccctgaactgttcatagatctggagtgcaagctcactagacggagaaaatagagtcagttaccgaggatgaaataaagacgaaagatagaacctctcatatccactaggacattgaaacataccgagttggggtcaaaactaaagcgtagatcccgaaaggattccgcgcccattgctgcataatcggaactgcaaaggccatggtctttccggaaccagtgcgacttccaccaatacagtctttccctttcaagatctcaggaatgcaagccttctgaatagcagttggccttttgatcgccattgtcgccaacgaagagacaagccaaggtgcgacatctaattccgaaaaagtggacagcccgctctgtttaccaagctcaattgcatcgctaataagaaccggatcatcttccttcgattcaggctcctcctctacctcgcccttcttcttgatacgagagagggtggggagcggcgcaggcgcgacgtatgagtcgttggaagactctgagagacggcggcgcttgggggctcggtcgtcgacatcgggttgttcaacatcagagttatcagacacatcggagtcctcgaactcggggttctctgtgatcgggggcgccatcttctttgcgactgtctatcaggacgaaataattttgtggcagaaaaagttatctctaataagcggtgggaggttgcgggcctggtttataaggcactgtatatgcatcaaatgaccttggagaaaatcccatcgtatttagttaaataagtagggtttcaattaatacttaatagacatcaattggttttgagtctgtggaacaaccgatctatttgtttagtcgctgccggagaaactagacatcaatcaatattccaaattgttcatcgaatggtgtataatagtggtgagaacgaaaacataaccaaacataattcgagaaactttttattgccacataggctatagtagcaccatttagtccgcccgactagctgtgcttctgcgcgaaacccgggaggcgagctcatacgcctcacctcgctctagctcatcctcttcgactgcagacgccggagaagctgaagttcggtttcgtaggactccgtcatctccactcgaatattcctcctgggcaccactagctattgcttcatcgtagtcctccagtccgtgggtgccaccgacactttccatggtgaatggactagctgtcggcccatcgagtgctgcaagctcctggcgggagaaccatttaggaagcaggaatgagcgcgccgggattaggaggagaataataacagggaacccgatggcagcgatggtctgagtgatagcgaaagtcgcaccaaagccaaacaattcaagagcgacgaaggcccagatggcgaaacggcgctcgattcgcttcagaggattcgacgcagaggtaaacttcttgtcctcagcgaggaaaatcagtttttgcgtaatgccattgccttgtagagcctggacacccataacaaagaacagaccagccatgacaccctgtggaatcaagtggagcacgatgaggaggggtccagtcattgttccgagggtcaaaaggccctgtgcgaagttgctaacacgctgctctactacgtggtctgtaatccggatagctttccccttatttgtatcatcttcgtctgcgacctggcgagtgacgcagagggcggcagtgtggaagggggcctggggaatcagaccattggggaatggtactcccagaagtccagctacaaaggttgtgaggccgaggagccagaggtcccagtggaagccagctggctttcgaagaggaaattcggttccttgggcaatgagagatgacactggaagagacgtgtcagccatacaaatctactgtaacttgatcgatgtagaatactcaccattatgatcaaaataaaagagaattgtaagaagaagcgcaaatgggatggcaaggaaaatatccccaacactgatatcccagaaccgcacaagccaagaccggtcacttgtaggaaagaaagctttgctagtagggagcgtagcgacatcaacatctctcattttaccgatgtagacgaaaccggtaaaaaagatgatggtcaaaggtgtaccatagtcctcaagaaatttccgaatgaatcgcttgaaaagatggccgttgcccagctctccacagatccatgcacacattaggacaagtagtgcaaccatgatactcagataagcagaggtctctccaacagagccccattgtctagtgagaacttgaatgcccttctgaatatagatgcaagcaacgtagaatccaaagatgtcgcacgagaaccgagtgacataggtcagggcgttgcaggcattagtgatggccagtatccaatgcataatcaaagaccagctattatggatgtcagcaaagtcaatgatcgaagatgacaaaggaaactcacattccaatccaacacataaatgcaagatacggtgtccctcgaggagccatgatatcatagacagtatagttgaacacagtgatgggacctacaatcctcagttcaactttccatgtccatatattccaggtttcttaccagtgactccgacaatgaccaacggttgggccgcaaaaagcgaaaatacaaatgcaccaagaacggaagcaagtaggacttcattaacgccatagctttgacttgtcttctcgaacatatccaacgagaaggccaaagcaggcaagatactacactgattgttagcaaatgaaacagtgcgccggagaagaagaggttgatttaaccaatcagagcaagcatacttagcaaaatacatatagaccgtagcaggcacgacacgataatcccatgcatcagtccaatcgctccaataatatggtgctctgcgcttgacgtcgttgaccattccacggaacaaatggacgtgccaccatcgttcctgggctgagtgcaaccccgttgtcgacgcaccgcgatgcgagttttcttgcgggccgtcttgtcggtcaagagactggtcagactggtgtgcggtaccatgatcagctctgcctgagccctttgagcgcaccgatgatagctgttgcgactgccaagaagatttccgctgagcggacgtggagtgcatgttgggtcccgggagggacaaatccccgtgtgacgatccttgcatatgcaattgtgggataaatccgattattctttagtgtaatacaactggtatgaatttataaagtgccagtgacttgtattgtacggaaagacatatcatataggaggacatgaagcaggacataattgaagggagcttgattttgcggagaaatgttggggctgacctataagtggggcctgaggcatctacttcgagttaggatctgcctagctggtcaaaccgctactttcatttacgagtgtacaggacaaatacgataatccaacattgaattcaaggcgaactagaaagaattagtcggttactcaaaattgtatagaaaaggacaagtatggcgtttttggaacaatcgttagcgagccgtgggcttctgaaataaatcctcgttggattgtctttcaaagcctccatagccaatttcttcgcgcatgaacaaactatttgaaacgagatcttttttcttcgctgggaaggcgaggtcatcactgtgggggtgggggtgggggaggcaggtcgcttggaggtggtggaggcggagcatcgccaggcgggggcggaggaggaggactgccagcacctccggggtacattggagccataccaggagggggaggaggtgcgcccataccagggggggcagcaccaggagctcccatgccaggaggataagccgcatatccgtatccaccataaccaccaccataggcaggctgctgtccgccaggaggggccggttgctgccaaggagcagcacccggagcaacaccaggagcagcataaccaccttgagatccgtaagcgtagtcgcgggtttggggtggaccttggggttgggcctgcgcagcccaaggggcaggaccaccctggttgcgagatccatagtcgtcacgaggtccgtgattgtcgcgggatccatagttatcgcgggatccgtagtcgtcacgagggcgagggtctcggcgctgttgccatggagccacatcgctttggggcggcggtccacgctgctgccagggcttcacatcacggtcgtcgggacggccattgccaccgtcgggaccggcttcaatgcgacggggctcgtattcgccaggagcaccaccagacaattcattcatcagttgctaaggggttgttagtaccatgcccgagaaagcagtcatgagcaaagagaacttacctccatctcgcgatccacggcatcaccagtgccaacagcacgatcgccacgtgggccgccggcgttacgccagtcactgcctctctggcggtcgggacaatcacgagccatatggccagcattgccacagacacgacagatgatattcgcagtgaagttacgctgctcggggcagtcatacttacggtgtccaatttgaccacctgataagaaccacggttagaattaatcgcgcaacaaaggacgtttgaaaggtgttcacttacagttctggcaagcctggttctcgtcgtcacgaagggtaccgttaagagcagccagctcacgaagttggttgcgcttgagctcgttctggccttcagggatggatgcggcctagcaactgttaataccgggttttgatcaacaaaatgagatatgggaacttactgtttcaatgacattgtggacaagcttcttggccttgttaaccttttcttcggtgtccgccataatcagacagtgcaggtcttcttcctggttgctaccgtgagcggcgtcagaccgaccctttccttctttgacggagcctttgcctcgaatggcaatcttggcaccggactcggtctccatctttttcaaggtgtttccacgaggtcctatgagtaagccaactgtaaaaatagcaagagctaggtgttagtgatcctgtaatttttttaaatatgtgcagcatcaagcaccacggtttagcaagaaacaagctgaggacatccaaagtggtatgccttgtcagctcgagtcgagtagggactcgtgatagacgcaatggaagaatggttaggagttagagggttagttatcatactgaagttaatctctggatagtcattcacggggacgtagaccttctcctgggtcttggtggggcgtctgtagtcagaaggcgggttgtagttagggatggtcttgatggccttctcgaccagtttatgacgttcgtcctcaagacgcttgcgataacggtactcgcgagtgttcacacgtcttccgaagttgtcgtactggggaggtggcgagggagatctgcgatcaaagtcagtatacaaataaacggagtttacaaaggatgaaagcacgtacctgtcaccatcggcggggaccacgtcgttgattcgaagcttctggctgatttcctcaatacgaaggtgaagcgtataagcttcaagctgctcgctggtgaagttcgccatgatcatagttggcaggcccataagaccggcagccttattctcttgttggtcaccccagcggttgcgcttcttgcgcctcttgccatcgccatcggtgttcaagggagctggatcggctttgaagcaaggtcagtcttgattttgttttcacctttgagtttagaagaaacgtacctcgaacagggctacgcccacgctttggaccatcgggacccatagacgaagaggggatagaagaaggggtcacagtgcgactttcctcctctccatcctcgccgcccatgcgtcgccggccaagcgggatgttgttggagccagttattccctggttgcgccaagccatgactgctgctttggatagaaaaatgtgagtagtaagtgatataggtggaagagatgaaagaagctgcggtgttcaagaggcgagcatgaacacgtgatttcagcaaaatcttatttcgtaggcggtggcgaggccatactcggatttgggtatccccggacccgatattatgatgttctccgcttcgtcttcatagatgtacagtcacggtctgtacaatttccggatttttacttcattcttctcttatttcctttcaaaggctccattggtccaacttttagttaggcctattcaaagggtagaccttagcctgatttaactaggaggcagagttagtagagccggtaactattgggaaggttcggatggagattatgaaaaccaacgctttttgatccagagcaagatgatctttaaaagggaaatgaggtttggggggagaataaaagtagcatgctgggatgagagttcgatgaaatataggctgaggattccactcctcggcattagcccagtacctatgcaggtagatggctttagcctctccggttttcaatccaaatctcccaattgcttcttctttttccattgcttcaggtcaaatgttaccgtagctcatcctgttgtccattccacatgaaagaagccccttcaatggtattgtggatgctattgtcattcaaaagctcaaccaagcaaggtgttggctggtacataggccgcgagtcaatgaagtcgcgtctgcaacagcatctcatatgccatgccatggactgaatggagtggctttccatcaagaagggcagggcagggcctcaaagcttgatcacagaacctatcactctagcatgacgcatgacggagggtcgatttgatgatttcaagactgacccgttaatgtcccgtagaagaaaaaaacattctttttggaagggatatctggaccagtcatccttagcagaattgtcggatactgtctggttctgccttaacgtgtctgccgagccattgcattcaaggaatttgcggagcatccgggggtgtatcgctcattgtgtgtgtatgcagatgctgacctcaacaggccaggactcgggagagcgagtcaaggaacgcggataacaacactgtgtattccgctcgtggtgtagtgatatggagagggaaagagctacccgtaggtatctcctctcagtgccatccgactccaaggttccttcccaggttggaagtctagagagattacgtcagcagtagattttgaggaccctgcgatctggactctacacgacgatgaggcctttcggatctatgcttgtaggtttgcgattttttcgatactcagtgggcatgcacagtcttactcggttataaaaaaaaaactgcgaggggcgagcactgaaatggaaagggaaagccctgggatatggcctacaatctggggtatacgtgcccatgtaaagtgttccataacactcatacacaatcagaaaaaaaatttagtttatgatctcttgattggaatttcggtttgaaatcatctgcgcagctatccaagtcatcaatctcccagcagttcttctttaaactttgcctttagcctgggcctgcatcccctgttgaatccaagacctggcttcagcagccgttttatccacagctgccttattctgaattagatctttaatggtatgaggagaagggacatgacgaccactctcagtacctggatgcgaagccataagcttctcccaagccttaacattcgggaattcgtcaatatcgatatcagcccatcccgcagcagctatccatccccagtgtgagatatcggcaatagagacatggtcaccgacaagccaaccagactgacacgtagcaagatgtttgtctaaaacaccatacaatcggcgacattcgttgacataacggttcacgccgtactcaatgcgctcaggcgcataccgtgtgaagtggttggcttggccttgcataggtcctaggcccgcattctggaagaacagccagttcttcatagcgtagtattcccgcgtgcccctggggaatgagatcttgttgtcgtgatcgtactgctctgccagatattctagaatgctaccagactcaaatagccggatctcctttccatcgctaaagaggtctgtcaaggcagggatgcggccattggggttgattttgagaaaccagctttacggtagttagctttgtttgtgtgggtatttgtaaagacatactcttccttttgaacgttcctcgatatgtcaatcttctcgaccctatattgcaggctacactcttagtaccaagcgtcagaaggtcgaggaaactactgtacccaagcatctctagcgctatggatattttgattccattgggggtctgggttgtgtagagggtaatagttggttctggcatattgacaaagcaagaaatggaactgaagattaaacagatgattgagaaagacgaattcttaatagatggtttaagtatgtatacgatgaggtcacattagctttccccgggctaaccccccggggcccacttgtcggatttataagctcgtggaactcacggactccgggaatgttctcccatgtgaagaatcatatcacctaagcagatgcccgggacttcttggggaatagttccgttctattacccctagtcgcatacattgcggcgagtgcatcaaaatacatgccctgcacggattgaagacgtgcgtatccctcgagtgtggattgtggcctatgggaatggcggaaaagaagcagatatggtggatggttgtgcaagattgaaacagacgaaagacctgtgtacctagtcatgtactgcttagtgtctagttaggtctgactgtactattgttatggctatgtagtgaacgagaggcagggctgttcatcaggcaggtcgctacaagttaaaggcttgtttgtggagaacgacgaagtcggcggttattccctggactgctgtttgaatcattgggcctcgatgcttaagttgagaagaatttctaatcaaaccgtgcattcgcaggaaagatatgtacaactctataagcccatgacgacaggaagatcgctgccagaagagaacaaaacgatcaaagtatacaagaaaagccagctgcaaagcaaagcgaacaggcaacaggattagactgtcgtataatcctgcataaaaagatgacagggaccatcacaacaaatacgctcatacgccaaaaaaagacagccacatatgtctaccagtacgtcagtctaccaagagaaactctcttccacataatcaacactagactgagcctgcctctttcgacaaacacggcgaacgtcatcactcagaccgccattgccgcagacaagaacgcccatggcaccaatttgattctcgacctccataccgaccagtgtgtcaatattcggacggccagggaacatctgcacggttgcagaggggctctggatctccttggtgttgcgcggccgtgtaataaagagcataatgcgcaggacttcacggcggcgatccattgccaagatactggtcatccagggccggatccactccaagtgttcgggggactggataatccagacgagggtgacgcggcgggcggcgacggtgccattcgcgaacccggcgaccagatgacggacgaaggggacgtggtgggtgatgccgactccgccggcgaagagcatcaccgtaccgtatgagtccatggtgtgaatgttgccatatggaccctcggcgaaggcgcggagggtaatctgtgaggtcggggagtttgaagcgcgctggaagagcttgtcggtcattccggtccggcggcggacgaggagagagatggtttctttttggggcgcattgaggatgtctttgcttgtgagtgggagagacttctcgtcggaatgactgtctgccgtttcactccagccaacggagaacgggtgtgaggtccacaagcccactgctgggatgtagaggtagatgtgctgacccggacggaaggtccaggggcgggctaggcgcagggtaatgcgcattgcgtcgccgtgcaaagcctcgatggttgcggtggtggattcacgaccgcagttgcggtacacaatgattaagaagcgggtggctcgctcgagtgcccagaggatgagggcagcaagtagataggcttgcgctggcagcccgttgagatggacccagaggaaacccatggaaactgccgtaatggcaatgtgcaaatggaggaatgtctcatagaatgcatggcgaataggcgagggcgaatgcagcaagagcgcagtgaacgcgcaagcagccaccaagccagtcagcaaaaagctgctaccacccagagccattccgacaaccttccagcctttcgcttgggctttgggaatagcccatgcaaacacatgtgcaagactctccagcaccacgatgcggccgagccatcggtggagcagattccatgtatcaaaaggcacatggagcatagcaattagagggttgctacggcctgccatcaagatcaatgggatcaagttcaccgttgccatcacgccggtacggttacgaatgacaccagcaagcgtgtctgtttcggttccataaggagttgtcacacagcaaagcgtgacgttcatggcgataacgccggtgataaggaacgcatggaagcggctaggcaaagtacccatgttaatagctgacgagagctggagttcaaggttgtgtcggtttcggaacaatgcagcatagattatatgctccttgatccaggcaaaggtattgtgtgttgagacgaagtaccgttgccggtcatcgttaaagcttgccaggcgtcgaaggtggcgagagaagcagaagacgagctgccagatgtaataagcggcggcagcacagccaagggcaaggattgtatagcgtgccagactatcgttgatggcttcgtagtagacagagtaacccgatcgtttttcgatgtattcaatatccgtcgcactggtcagcccagcgagggacatcgccagcagaaaggagtgcatgatgacagaagatgcacgtcaagtgcttgggactgaacttgatgtgtggtttagcgaggccggctcgctagaaaagagtgtatgaaaagggaaacgttgatatctggatcgaccccacagaaggctcggaagatattgtcgagaggtaacagtaaacgaaataaccttaggttgcttggtcgaaccacagaagcaagggtcaaaggggtttccgttgggtggctggtgtaaagtaaaggacctgcctatatcttatgtatagaaatcagacggaaagcatggaataaagccgtttttcgatatgttgtcagtccaatcgagctcggtgggaagcgaagatgttcacagaacagcgggcgatgtttgttaaaggcttgttgtcgaagggcaacgacaggaatgctagtgatccagtcactgctaaaaaatgggctaaagatgaagaattgtccacagtgaaagaatgaggattgtctcaataacaaagacaaaataaatgagacaatattgattgtagttagaaaaagagaagaaaacgaacaatgaaagatcgaaaatagaagaaaggactgtttccccttgtgtttagtcctagtgaagagagagtaagacagtgccagggccaaccggaccaatatgtagaattccagcaagactctccacctccagcacggcccatatcaatgtggaattcggtcatttccattttggtttccgggattgttctcaaatttctcgaaggaggggggcttgacgctgggaccacaggtgagtgtaagggatttctcatgtgcgtactccgtatggaagatgctgcagatccaatgcagcaaatcaggggcccgtatttgcagataacctcagcagagcttggcaaaacatggacatagaacacgcgacaggtcaagcccgagttgtcgtaagtggcgggaataccgatcaagagctgtgactggccagcactgttcaatagtgaaacagccaagtggatgaagcagatccgtgttgatgcttggcgtctcctttagcgcccacgtcaacccacattaggggctgtgaaacaactccggtcattatttgctccagtcgtcactgtaaaaggttatctcccgtctccagggggtgttttcttggcggatttcatttatatcagacctgaatctcctctcacggagaattatcctccgagacactgtgcttggcctgcatctgatgaatatattcttgccattttccaggttgtcctttactccgtggtttggcgaattggaacgggatgatatgaataattcaaggccttgtgctagagtttcgtttccaatttgttttatcttaggtgccatataaagtgcgcatgtgaattgtctcaggttcatgtccaatcgtggggtctttccgttggcatccgttggcattcgttggcaccgttggcatcattggcattgttgggatcgtgaagtccaaagactagtccaaagttgagaaaaactaaaatcgattacagaggccatgaacaaacatccaaacatccaaacagcaaaaatccctaatccaacgccatgggtatcaaatcaaaagtactaaacaccgatttcctaaaacaaaagcggaccatccatatccaccgttcccaaataaaaatgagccaaggtctcgtaaacgattgatcaaaatcagccatagacagccaaaagatctctttacaatgtaaagtgggatacacatcccagattcatggatgaaccaggggactctggggggtatccgacactgctcgcgaaggtaatctcaactaaaattagccaagaaagccccgggtcaggccccgatcaaaaaaagctgagctcgtcgtcactgtcactatcctgaaaatatggattgaccttttgtcgaggtttcggcggctcaacgatgccgcccatggttgaaaccgaagggcgcgtagaccttcgcctctctactgtacgatggacctgcttcgcagcacgctccaaagggggccgagcaataggctgacgcgggctgcattctttgtgattgacgatcacgacttcaaccttccgtgcctgttgtgttgccggggtcatccgtctagccagattggtgctgcgctctcgcaggatgtcccggcgagtgactagttccacggtaggattgtatctagtcgagaaagtagagcgtacttgaggggtattttcacccttgtcaactacaaccactggagtgagtcgttgccgttttctaggccgtgttggtgaaacttcggtgtcctctaaagtccgcttggccgccatcggcaggggagatgaggtcaaacttgagacagagtcctggaagcgatcagacccaggtgagccgctgtttgtgtctgtagaagaagcgatacaggggaccgggcttgatagcatgcgcatgggcctttgcatcaggatgggctttcccttggtcgctggcgtagatgccacccactcccctatgctatcttcccagcgaaacagacccgtactctggctagatttctcgggttcttctaaagacctttgggcagtctcttcctggcgctgttttttcacggctgcctcctgaacgtcgatggcccagatgtggtcatcgggatctcctgtagcctctgcaaactccatggcagcttccgccgccactcgcccaagcaaagtggacaaagctggtgtatcagctaagcgaacgagttgcgaaatcatgtctcgtatttcgccgccagtatgttcggtttcatcttctgctttctttctgaggcagcggaacgcttggtgtacaaacaatgctaattctctaatcatgtcagaatgagatgctataacctccgcgtattcgtcaatgctagctgttgacaccatcgtatagtggttgtttaataaaatttcgtcgttgcactgtacaagactggtagccagcaagatgcagccacgccgtaataattgatgaggggtattatcaggccgctgcacgacagaaattgagtctagttctcgctgcagagcaatatgaagatagcgtgtaatgcagctcgccttcgttccatccgcacaatcagtgtcttcggaggcacgagaccttgaaatgtgcatgccgcagatcgctgccatgaggcttataacgtgattgctcagtgcatccttcacttgtaagggacaaggccgtgcaatatttgagatttcccacgctatggggacagccctggtcgtacgagcacgggcagtcattcccttctttcccttcacgagtaattttggtgtaggactctgagcaggggtgacagagcggacaccactagctgagagaatcacagcttcaatcagacgcgtagctgcaggacagtcttcatcctcttttgagagggatatcgttgctcgtgtcatccagctagtccacaacttggttcccatccactctggaggtagcactccccgcaagagaagcttcgcaagttcatcgaagatgtaagagcgattggcaacgccatgatgagcatacttgtgtaacaatcggaccggatccgaaaggtcatggccaaccactggccttacagcctgggggtatgggtaatttttgcgtgtggaaagcaatgtagagagcaaagagtcactttcttcgggcgcaaaggaacgacatttctcaatcagcgcgcatgcaatcgaatctgttatccaatgattctgtatcagggtagaaatcaagtagataccctgggcgcgaacagcctcgcgaagtggcttccagcctgtcccataaggcgcataaaatgcttccaattctgtaaaatatgcattacacatatcttcgtccccgtcttcgtccaactcgtcctgcgcctcttgctcgctcgcaataaattctggcaaacttcgtgccaccatgaacagcaaggatcgtgccccacgcctgtttgtttcggataagggcttcacttctcgcgtcgatatcacagtattgcaaaggaaattttggaagacgcgatcaagattgtgtgctatgctggcgaagcccggatcaccagactggtcaagaagttcttgccaagggctcttgtggagcgaatatcgatcacggaacacttgcggctgtggtagttggctattggggttggcatggccttccgggcgttttgacggtgcactcgagggcatctcccacctcctcccagtgatgagtggtgtcgcgacctcaatagcgccgggcagagtgcgtggggcttctgggctgtgtattgatagtctatcgcgctttttgcctgcagtatcttctgctttggacgaatacttgtgtctgggtcgacgtcgctcgggctttttccctggaatccaagctgggtcgttttcatccggatccgcatccgagcctgagcagttgtgccgactttctggtttgtggtcgggttccgaagtaggcaaatcattgctctctgctgtttcttgtagttttgactcggtcgcgatcatcgacaccgtttctttgtgctttgcgattcgacggcagatggaggtcaaggggcgcaggacacggtttgcccattttgcggtggcttgggcatcctccatttaggacaaaaggaataataataactgctactagcatacaaaagaatcagcactgtcacagggttcttctggtcattggggctgcactgtaccaacctccctactaacaaacccctcaatgatacatgataggaacaatgatggcactcaaccaggtattgccaataatgcagcaataagccaatgtaaataagatatgccgaagaataattacagggtgcgttgagtgaaaaatgaaggacaacattggatgagcaaacaaataaaacaaacgttgactaatacaacaaggcgggtaaacacacacatattgcctattatggcgatcttagtctccagatgtatacaatcatgttcctggaggtaaatatacatgcatctattccatttcaaacacttcatatcgacgtaattgattctactcagaaagagaaaatgacccaagtggcaaatccgcataatgcaccagatatgagcccattttaagacaaccgagtcctttccatgcacggcccaggagaccacccaacctggcagatgaaaccaaaaacgagaaaaaaaaggagagaggagagagatctaaaatacaacagttctttttgctcatcaagcctgcccaccgatccccaaaatgacaatggatatagatattaacacatgtaatagccaagaaaataagaacggaaaccaattaatgctgtttaaattggctggaactggctggcgtaggaaatcgtttatgccttgttagactgcttggagccgcgaagcttagggttgctggtggctgcacgcttcttctgcttggagcgcgaagaggtggcgtcgctaccttcaatgaacttcagaagctcgtcgatgctgcgagagtcgagagccgaaggatcggtgggagtactgatttcgggcgcagactggccaacctggggctgaacacgggttcccatggaagacacacgagggttcagagggttgcggcgcagacgacgagcctggatgtccttggcgtgcttggcgatagagacagcgttctgagtgagctgctcgagccagttctcggcctccttggtgttgcgatcttcgggtccaagctgagtgaggaagatgttgtatgcctcgcgcatcttgctgacggcagccttggagtcctggtccaaagcgagtgcctgggcgagttggaagagaatagtggcggtattgatagagtccttgccaaagaggtcctcacagacggagagagaggcctcgaaccacttgcgggagtcgttgtactgcttgaggtgttgcagcatcacggcggcgttgttcattgtggtgatggagtcggggtggttaggaccgtagatgatcttccatacatccatagcatgcttgatgtaaaccagagcggtcttggtgttaccagaggcgtgctcgaatagactcaggttaaggtagctcagaatagtgtcagctgaatcgacacccatagtgcgttcagtgacaatgacggccttgcgggccaattccacagcagcctccttctcatcagtctggtagtacagcatggaaagctggtggtagagcttggcgacctcaggatgcaggataccgtaaatttgctcgtgcagagacaaagactcaaggatgagctcctggcccaactgcttctggttctgcatgagagagatacggccggcctccagggcctcctctgccaatgcgctgcgaggagaggcatcacggaccaaaggaacaacattcaggatgtcatcagcagtgaaagtgacagcgggcttagctggcgctggagcggcacgggtaggggacttgttgtctccacccttcttcttgcccttcttcttaggctcctcgtgtgtggatccgttagtgataggaacaacaacctgctccttgacctgatccttggtgaaggcgaaatcacgggcaccaagctggatacccaacttgatagagatatcacgcagaagctgcaagtatctcagggagttgctccagtccttctcaagggagaagcggaagcggatggtgacctgcttctcgatttcggcccggagggactcgggagtgacattctcaaaagagaaatcgccctcggggaagatcgcacgcagggattcgtcaatctccgccttgggagtagcgttgacatctgaaccgaggagacagttcagcaggtgagcaaggcaaggggcgacgaagggggcgggaacgttgttcaggtagcggttggcaacgtgcttgaaggcacgagtaaccatttcctgaaccacgaggatggacagggcctgcaggcgaggtcccttctcggcggattgcttggccaacgttccgaggtaacggaggttgataccacgcttgtgcaacagctgggtcagcgattgaccgtccatggggaagccgacgtcgccgtcgtgcaggtccttgagcaggtcggggatgaccttggatcgcaagtgatcacaggcatcccggacttcttgctcatcctttgcccattgcttcttctcctcctcagtctggggcacctggccgctgaaaacatcggggttgagagcaaggtggaaatcagagatgtcaacacgatcctgctccgcattctcctcctcaggcttgccctccttggcagcctcggcggcagcagccttacgactctccacctgggccttcacgtactggctcatcttgtggcgccagtaggactcgaccaactcaagtctgagaacggacatgcggtgggggtaaacatcgcttccatcttcttcctgccactcgacatccagaggagccacgcggtagagatccaggacgtacttcctgccgtcagtgcccaagagtcccttagtctcgacgctaccttccaactcgtggcgcttgttttccttgtcccagacagggtgctgcttgacacgcagcgccttcgagagcttctcgaagaccgggataaagtcagcgtgagtagccacaacctccttgccctcaacaccaccgtagtcaatctggtgctcaccgggctcgcgctgcttgaagataccaggaacaatgctctggccaacaatacgcttgcccaggtagtcgaccaccacggttccgggagtgaacagtccgtcgatatcaagctggttaacggccttgataccgagaacatccttgcccacagccacacgtgcggcttcgtcgccaccctcggaggtgaaagttccaacgccatcggcaccgaaagagtagaagatgttgttgtagacaaagatctgggcgtcccgcgcctcagtggggttcagaggagcaacctcaccccgggcaacaaggactgcaccacgagcggcggcctcgttataatcagcgaacagcttggaagtcaaacgttcccggaacacgcgatcctgaacggtctcgcggggcagctcgcgggtagtctggaactcctcgttccagtcacgcagagtctcggcattatcaacaccagagatcaggtagttctcctgcgaacgggtgatatcgggctggtgagcattcaagcttgaactgctgggggcgatgagccatgggctgttggggatggcgttctggaaggggaaagtggtcaaaagatccttctcattgttgtactcctgcagggcctcgaaggaggcgtcgaacgagggcgagagttgagagatgagagtgagcaaggagtgggcgctgcccttcttggggtgtgttggcttcggggatgggtcgaatctgacgctcgagcacttgttcacgaagaaaccagacacatgggcagtgatctggaattgttcaccttcgttagtagaaaccacgaggtaaagcaagtggcctttctggcggaggttgtacggaacagggttccatgcagacaacgagatagacttcactgtctttggcagaggagcctctgcgatgggcaggatagtttgcagcggtgaaggtccagtgaggtcatatttggagagcgagtgttccttgtccgactcgccggccttgatagcgtctgccgtgatagcatcgtgcaaggacaggccagcggagataccatggaggttatcaacacggtcaccagaagcaccaattagctccctgatccgcacaatatgcatgcgggcttccttttcggtgtagggatcttcgaccaggacgatctcggagtcggcctcgaggtctgggacctcagacagctcaacaaagtcgttgatgcggttgccgttgaactcgaggtggaagcaagtgtattggaaggttcccggtaactcgacaatggattggcggacatcctggacctgttcttggctggagacctagaggaataaacaggtcagataaattttcgctatttgtggcttttccaaacatcgaacccaccatcacttgaatcttatgaggcgcatgagggagcttcacggtgatctggaaaagacctatagtcgggttagaacgccgctacacagttttgcgcctgtctacaaaacataccaccggtgttgtcctcctctgtgccctcgggggcattgccattggtaatctcttgggaagcttgaggagcctctgttcctccgttagcttgtgtgccctgcatcttgttttacccggagcccatgctgtattctaatagaccttgtccagcacggaggttccaaggaacacacacctttcgagtgctccaactccccattggtctctgccattatgtcgagccggttatgaagagagcttcgacgaaagaataacagtaaacccttatctcacaaccgtcacgcgggcgagagacaaagttcgggaaaatggaacgaaaagaaaaaagttgaagaccagtggagcttccagggattcggcagatagaaatcttaggatagtatacaatataagggcaattgagcaagaaacaaaaaccccgtaccccaggaagttgaaaataaggcaaggatgaatgaataggacggtgaaattgggagaccggagagaaaatttctcggatgcggcataccctcggaagtgctcgggcggtgggtttcaaggaagagcgcggagaggacattcattctccacagtgtctatattttggctgtgactttttggcaagggtgtaattagtttgcgattatatatagattggaaatctatattcctgccaaggtaagcctatataattcccattgattggatgttgacttcaatcccatagatctacaagtatgacgctgtagtgcctcaggtatcaatatttttcgaatgtgcattagcgattgtgtacaccgtggcattttacttttcattttaattttattggtaataaatcatttcccaggcaaggtttgtctttaattagtctatcttaatatgcagaagataaaatgtgtatcgtgaagacggtttaattctaacggagctgacgctatatgtactatgtacttgactaaaaagagaggggcgaggtagggatatagatggagcaaaattaaatgtttgaattctaagacctagtgctcgaggaacttttcaacttttcaacttttcaactgggtgaatgagtggattatagactctgccaggttgggtatatatgtgacgtagaacaaaggctgagatctataactcggggtttcaactattctctagtagtagattagttacctagatacatatttacttagtcatcccttctagcagattgaataggaattggatgagcccatggattggatatcgcaattgttagttagaatccacgtacagcatagaggctatggtactttatagacaccttatttactctcctaaagccaactgggttttttcaaggatccactgtcttacacagaccttgaggaaaaccaattagagaaaccccatatattcattgtagtaatacatactctacttgcgcaacgtaaatagatggcgatctgattcgccaagccttccgcgtccctggttcatcgaggctgatgttaacaccacagctcagccacaacttaattcttttcttgaactcctttctttcttctagtctttcattaacctcttttgtttccttgttttcttgtttctcttctgatactcagtcttttcgatccgcaaaatctcccacagtctctctttcaccgacgcgtcatcccctagaggtgtggcttgcgcaaccatctacaagtctagaatcctagcagtacactccttcaacctttgtgatttatatcgatacaggtcctacacagccatctgcagttctggttatctttgacaaagatatacattctcactctcattgcctttcactggacttagcaacccgtacaaacaaaaaggccaatcacgatgctatggagccgactcgcacagcctgcgaggtgctatgcccgacagggcctgccaaggcctcccaggactaacagccgcgttgtatcacacacatgcaagcggttcaactcaacccctggtcaaatgaatccaaacccctccgagcagaatgattcggatgagggcaagggcaagggccagggccgtaacggcgattctgaccccaacttcaaatctactattctgaaaatgcttgaaactgcggcaactacggcagcatcaattgctattctagggtaaggtgtacctgcattattcaaggcatgcgttactgtggctaattttctcccaagcgcggctggttactcctatcaccagtactacaagtacctgatcttggaaaagatggacaatgcgttcgaaccaggtgatcctgccctcgaggtcgcgggtgttgtttctgggaagcaccagtacagccatgaggaacattgggtcattcgcaacgagcaacctagaattgatgatattgtagctggtaaacaaagtggccactactatctaattatcggtgaaaagggcacgggcaagacgtcgatgcttttggaggccatgcgcaagatcaacggcaacagctgtgcgttgttcgaagcgcatgctgatcttgaaatcttccgaatccgactgggcaaagctttggactacgaattccatgaggagtaagcttatactgttatcatcttaaacaaataacgctaatgggagtacccagctatattggcagccttttcagcatccgtggtccgagagacactacggctctcttggacattgagcgcgccttcaacaagcttgagaaagtggctctcaccagaaggcggaatgggtcgactcctcttatattgatcatcaacagtacccacctagtccgagatgaccacgacggacaggatttgcttgagatgattcagcagcgtgccgaacaatgggctgctagtggtcttgtcacaacaagtatgactccaacaaacgtcggttcctcttgccatagctaattttgttttcaagttcttaacagcgatgactattgggtatacgagcgcttgaagcgttatgcaacccgcatggaggtcattcctgtgtcagatctgcctaaggacaaggcgatgagtgctttgaagaaatatcgccagcaattccacaacgagacacttccatatgggatcctcgagcaagtctatgacaaagtcggcggtcgactatccttcttgaaccgtgtggccaaatctaaggatatgacacagacctgcgatgaaatctgtcaagcggagaaaacatggttcctaaataagtgctggatcctcggaatggagatggatgatgatgtgatggaccagcagaagtacgccgtaagtacacactttaagatcttctggttcttgttacttcgatgcaactcagaactaatttaaaccacaacatagtctgctgctatggttctggcgaaagcgctggtagagaaagagaaagagatggagtcaaactaccacgaagagcaaggccacatcctgccagaaattccgctccatgaagcgcgcgagatcatgacccgtgctgacttcattcaatcttacgatcacgaaaatatcttcaccattgattcaagagccatggtgcgtgctgattccgtacccatgcagcgtgccttccaagaaatctgcgccaaggagaacttcgacaaccacctggacagaaccttagagcggattggagatatcgagagtcttggccgtactcgcgaattgaccatcaaagatctctggaataatggcaagtatcgcatggttgtacgggacaatcgcggacgagagagtgggacagttgaatttgctgtggctgaacgtgaaggtgaaggtgaagatgaagactagttattttgtatatgtcatacctagattcacaaattggaggtcctattgtaattacaaatctatactatgtggcagccctggagacatcaagtcgccgagtcctcgaatctggcccttggaaaggcaagagtgacatcatcgtgtgctcaccgccaaccaaacatttggcccgccttctctttttctcttccaagctttaaccgcgtgaacacaattaccagtgatttctactcttgactctgcatttaatttaactcgcttttcacatctacaagcctcgaagcctcaaaatgccgactaagacccctaagaaacgaactgtatcgttaagtgaacacacgcgacccgcgcgtgagctcgcgatcgcggccactgcacagacctctcgattggcgtgcatcccatctccagcgcgcttcatccttgtcgttttaagcagtctcactttgagctccgttcttttcacactcacctctactttgacggttggcgatctcgggcctatcagcaaacaccttgaggaatggtgggaagtgggcggcttgatcgcctggagggctgtggaggtcggattagcttgggttctaggatttgatggtaagtatcaataccatacacatggccccttttgcgtccggactcgaggctcctacagctatatagacgatgcaaaaaactaacctcgtggttgcgattaggccgtgatgtggcatcgttcctattcctgacgcacctaccgacatactctctcttgtcattcttctacggcatccgcccgacttctgcactggtagcatatggagtcacgattgtctccacggcgcttcccttcgcactcctgcgccggccctcgtccgtccacaacctttcgcaaacacctgctggtgcagttgccaatcgaaacattctacaggataagactaccactatattcacgactctcctggcaacctcgattttcagcgttgtgctgtacgccagctatgcgacttggcttcctacacagctggtcattcacttcgagggcctcccggatatcagcgcggcgcatgctggtcccgctggcttgcctgttctcttcctgacactgattcctgctggctgggctgcgcgtgactttttatttgttagctctactggttattcaaccgctaacgatgggtctgcaaactgctgcgagggtgaatatttggttgcggccatttgtcgcaacacttggggcaaactgaccaccaagacgagagttttggtttctcggtccattgtactcgcgcttgcagtcttactcaacacgattgttcaagtggccggcacaatcagtgatgtctctatcgaaggtgctgccacttggggagcggtctggtcattcgcgatactgattgcaggagccaccttcggctggatcgaagccgttgatggcgtatgataatatgtgataatgacagcatgagggattgtgctcccaggttgattttcgtttcagctgcgacgggtgcgcgagaggtagaggcagtgacccttatcctatttcttatggcgcgcttggttttgatatgtccaatggttttcttgaattacgatatataccttttgttgatcagctgtggggttattggcctcattcattatcttcgttttgtaaaatccccgagtcttatcttttttttccaaatgtcaagtactgcttcttcatacttcttcacactcggaacgttcctctattaccctttcgttattgtttgaatctgatatcttgaaaatggcctggaattgaaattaatcataagtctatgtcattggaacgttaatcgctgtataacatccaacaccccaattaagtatctagtatttgctggggcaaatcgtacgtaagaagtgacaggtatagagaagcaagaccaatcccaaaacaggaaacaggcaaaccaagtaacaagcacaatgatcaagcaatcaccagtgagtcggcggccccccgtacctgtccggttgatcaaccgaagtgcgctcggttttatacgaatcagccttctcgttattcaacatccatccaggatgcagcacattaaacacagccaccgaaacaatcatcatagccccatcgagcccaataaagtacgactcgtgagaaatgagataaccatcccatccctccgacaactcgatcgtacgatagatactccgaacatagatacagatgatggaaagtaccatcgccccgaacaggggaaggatcgagccggaccccggctgcagcagattcttgcgcataacgcggcggatgaagtcgaccgcgcaaatgacgaatatggttaccgagaagagctggaagacaattccagcgaccatgatgtgcgtgccagttgcggtgtcgccgccgaccgtattggcttctccggaggccatgccgccgccgatggcttggacgacgagggagattacgtcgcaggtgcagaagatccataggtacaggcttggcttcaggaaggaggattcgcggccgaggatttgaatgaagcggcctaggacgacgtagattcctgctgtgaagaaagttggggctgtggaatgttagggtgggcatggatagtcaagggcaagaaggtagcttaccgatgatgagggtggagatctgcattaggaaggcagttccgttgtatggacatttggctgaccaggtacgaccggcccagccgattacttcgactgttgatgttgttagtattgcggggagttagggtttcaaatgtcataggccttacccaaacatcccacactaaacacacttgcccaccattgtcgcttccatatgaactggattgtatggataatcaacgagaggccaaatagggtgcagaaggcaatgcctgctcctagcgatgggatatatccatatgaggtgccaacgccttcgatataggcaggacagccgtattgcagctctagcacgtcgaccatggcgagaaagaaaacgaatgaccccgaggaatctatcaggggattggcgagaaaattaaagctaacagtaaatccgtagtacttggatggattgaaagatagacagagattccccagacgactagagaagagatttatagacaaccaccccgtttgtccaaaatcgaaaagataccaaaagagagccaaggatcaggcttcagtattatccacgcgcacaatttgaatataagtgagaaagagtacggagtaagagcatggccgagcatccactagccccaccatcgggaaagacctttcaaggccaaagccacgggtctctgaatgcactacggagtacaataatctaccggggaggataagacccgcatcggcgcaaccaatcccgacattcaagttgttcatgtccaatggccagtttccagcgtccaaagcggattgagaaacaggccgactccggttggtatagaaaggcacatccataagatacggtaaaaagcgagcaggcagccaaccgcctgggggtatccctagccgatgagtattgtactttatacacccgacggactactatgatgtggtagattaaggatggcgtcaaagtcaagcctcataaaaaatgggcgcgatctgatagataaccgggccgaactacaacttacctcgcaagcctacactctttgggattagcgtggatgtcgccaagtttgcctcataagggattctatttatctccgctaaaaccgcacacaaagaagagtcttatgaaaggtctaaatgcgtcacgacaatcggtaaccaagcgctaggcagttggagagaatccggcttctatatctccgacttccaacgtcactccatcctacaatagacatagcgaggctatgtctacggttgctcgtattcaagagtcagttccacacaccgcttcaagataataagagacaatcacaatcaaacagatcaagtctggctctggccctagttttgtcgggatatcggatgaacgacaatccaggtccgccgcctcggatggcgcggatgtacgtatgtgaaaaaaaattacgaaaaagagtacgaggatccacatgcaccttattcgtgactggttatttgaatatcacatcttctcatatcggcttatgcatccctggacaacataatagactggcaacgtccatgaatgttaacaaatagccaaaggaactcatacttcgtatacttataggcaagccagaaaaggtaacgatcgccgatcttcactctagcagatcgcaaaagcagtggagtatttaacctcacgaaaagcaggccattcacacttggtacagccaaataaaaaattctccgataccgattctccaaggtccagtcaaccaacagaacaaaggtatttcccaagtatgatgaccaaacggagattgagtctcgcctgcaacattgcggcggtattccggccggacaaatcgagtgagcccatgcaaccatgcatatgtactccgtatagcgagacaactcagacacatgtcacccgattggacaccccgcccatagtcagtggcggagccgggggccatgcgatcgcagagagtgggggcgatgtcatcctctgtatggatcgggagcaacggttttcgtggggagagatgcaggagattgacactggtgcctgcatcagtatatccccatcccccacatccattcgcttcccagaaatcctccaaactctggccgccaagcatggcaccctgacatggtaccaaaagtacgtcacagattctgggcagcttccaatctcgacccgcggacgccgtgttcgcttacgtcatttctggatacctgctgggtgtgctagggctgcgatgattagcccggcgtatgagtgataggctgattgaatatgatgaatcggctctcacgtgtcgctgagaatcgcgcaccttcatctttttgttgactgatcagaccaaggttgatatgaacagacgactcggtgaccttggccagggctctgtcttacctcgttcagctactcttgctaaaacatggctatagtaaacctattcgattgtggatgggcagaagagaaggagaaggtaaaaaaaaaaaatgacgagctttcattttggtaacttttcatgcctgattgctctagaataactgacattgctttaagaaccttggaactactcaagatcccagaatggctcagccggtttgtggaagttgtggaattgtggcgtgtcatagatacccggaggatctatgagtgaaagtcagtattgcatggaaaattgcaaagaggatagagtactcaccgtcgcggtttgccacaatatacctcctcgtgttgacgatactcccctccagctgagcattcagctcctgctgatacacccggatcttctcatttcccttggcagcaccatgaatagcgtgctgagcgacatggtaacgcgagacacggttgagaagcatcatatcgaaaggcgtggtggtgctaccctcttcaatatagcccgcgacagtgacacgctcaagacgcggacgtccaaagagcaagccctgcagctcagttgggtagccatggtaattgaaatgaataggcttatcagcagtgaagagggagtcgaatgcctcagtggacagggcatgtggatgcagaccctggttctcaagaatcatcaagtccgtcacgttaatgacacaaacacgaagctctggtatgagcttacgcaaaagcgccgccgctgcaatgacttcgaacatcacctcaacaccaataccgaccagcacgacatccggattaattccttcgtccgtgctacagaacttccagatcgaggctcctgcgcgacagtgactctcggcctctttgggggtaaggtacactggagttggctgtttcgaacccaccatcagattgacgtagtttctcgactttagacagtggtgaacggttgtcaggaaagtattcgcatccggtggcaagtatacgcgagctgcagtgggcttcagtttcagcacagagccaatgaaagatgggttctggtgagagaagccgttgtgttcctggcgcgtccaagtactcgattcgatgtagtttatactactgacgctggtgtgccaagttgtttccagcgcctaaatatttggtgagcatagaattgacattagcaagggaaaagggaagctgaccatcttagtgaactttgcatactgcaccatcatcgtatgaatgatgccgaggaagctttcataggacgggaaaataccaatgcgaccggtcaaggtataaccctgcaggaatccttgacacatgtgttcgctaaggatttcaattactcggccgccgcgggcgttggagaactggtcccattggaaattgcggtttgtgccttcaaacacctcatcgagcttgttgctttccagctcgtccggtgagaacaatcgcacgttcgtcgggttatccttgaatgtctgattgatgaaactgccaatcactttcatggcgcttgcgtcagagcctttctctacgcagaagggcctccaatctggcaaattcggtcgtttgtaaccattgtaggcttcaatgcgctgaccaagcttctttttgtcttctgtgggaatcacagacttgatctcgtcaattacatcaccggtcgaagtgaacagctcgtctggtttgtaactagagagccacttctgcagcagatcgagttgttccttgtctgtctttgccttgggcaatggcacctggtgcgaatggaacgagccctcgagaaacatgccatgaacctccttgggccccgaccaacccttgggagtacgcagaatcagcatcggccacctcggtttcatgatcggcttcccagaacgggcagccttctggatcctctggatctcctcgatagcccaggtcatggagaagtgcaaatccgcgtcaatattattgagatcctccacgaagcgaacctggtacccatatccactgaagagagccacaagctctttgtggtccatgcacccaaatattgtgcgctcgctgattttgaaaccattcagatgcagaattggcaaaactgcaccagattccttgggatcaatgtacttgattgcatgccaggacctgtccgctatcagcgttgtacagtgcaaaggggaaaataatcgacgaacgtggcggtggcaccggtttcagcctctccgtcacccacgatacaaggcactatcagatcggggttgtccatgacagcgccaaaggacactgctagagcgtatcccagttctccaccttcatggatagcaccaggggtttcagcattgatgtggctgcgcataactgttagccgaagatctaaatagcatggcaaggcaaggcaccaacctaggaaagccagctgttgtgctaaagctcgagatcagtttgtgcaggcctttgctgtctcgcgaatattcgggataaaatctctccagcgagccctctagccatagtgcggctaggattgctggtgcaccatgtcctgggccgacaacgtacagcatgtccaggttccttgtccggatcaggtagttcagatgagagtagaccaaaattaggcccggacatgttccccaatgacctgggggtatgacatcagtcacgatggccgaattgaataattcggggatgctactcaccgagtagtcgaggtttgatgtcgtgaggtgtgagttccgactttaaaagagtattttcttgcaaaaatatcatagctagcaataagtcagtcgcgccgttgcaatatatatagcacataaccacaattacctgccgcaatgtaacaagccgctcggcgaaacttgagcaaggcatcacaagctttttcatctagtttctcatgatccaacttgacgctcagtttctcaagataatctggtagatacgacggcagcgcagctggatttggttggtctataatttctgcaggcatgatgaatttgatatagtagggttttagtgacttgacaggagcaagagaacattgaatgagttcaagacacaataggtgaatgagtgaaaactacaagtggaattgaaagaaacaggcaaagaaacaagttgccatgaaacatgccgtgtacttcgtgttatcgacgtcagcccacacaccctgacatcactacggctaatccttcaccttttgaaattcgtgccgattttcaaaaacacgctcgacgcgataaaacaggttcaaaatgactaaatctatcctagctgttaacgcgggttcatcttccgtcaaaatcaacttctataccctcgagaacccaccgagactgatcgcagatgcgtcgatctccggaattactgcacccccacctacattcaagtaccacaagggagacaagaaacacaaacaggatgtcaaacaaatactcagcaccccccaagatgcattcaagtatctcctgcagcgctgttttagcgaccctgagctttcagaagtcgctagcatcgacgatttggagtacatctgccaccgagtcgtccacggaggagactacctcgacgcagtcctcatcaacgatgagacacttgatcgcttgaagaaattggaagacctcgcacctctgtaagctcatatatctcgagtcttcatatttccgggattttatacctggaatcgactatatacctgccttggtcaataccccgctaaccccgcccgaccaaaagtcacaatttctccgcgctggagatagtccgcctgtgcaaagcagagttccccaaagttccaagcatcaccttcttcgactcttgtttccaccagacaatccccgaagctgtccgcacgtacccaatcaaccaggaaattgccaaggccaatggtctgcgcaagtatggcttccacggcatcagctactcgttcatcctgcggactgtagcacaatttttgaacaaaccgaaggagaagacgaatcttatcgttatgcatatcgggagcggggcgtcgatctgtgcgatcaagaacggagagtcggtggatacatcgtgagtcccgcaaagtttatattgcatctcaatctatctcgagttgagagtcgtgctaacacggtgactagaatgggcctcactcctttggcaggattacccggtgcaacgcgtagtggaagtattgatccatcgtgagttacatccaatgggctttcttggcaatgaaactatggccaactaatacttggtgatctagattggtcttccactataccaacgaagcaggccatctaaacccaggcagcacgacaagtatgcatattagcacggtatgaatacccaagaaccagtgccaaaaaggagagcaaggaaaatactaacccaatccaacaccttcaggctgagaacatcctcaataaacaatcaggttgggaagccctcacaggaacaaccgacttctccaagatcgcagtggcgaatccaccaaccaaagcacataaacttgctttcgatatcgtcgtcgaccgcatctcgggctacatcggcagctactacgttaaactaaacggtgaattagacggtgtagtcttcgccggtgggatcggtgagaagagtgccttgctgagaaaagcacttgtcgataaatgccagtgtctaggcttggcaatcgacgatgcggctaatgacaaggggcctggagatgatgagacggtcaaggatatctccaaggattccggcaaggggccccgggttttgatttgccagaccaatgaacaggtatgtggtctcaaatattgaggattattgaccgtgaccgtaaccttgacctctcttggaggtgaaggtttaggttataggttgttttgctttgatttactgacttgggatttcacttacagtttgaaatggcataccactgtgcagcttcgaggagttgatttctcatgcgcggtgtctagttttgttattagtttcttcttcttttgctattagtagcaacaatagtatcagtatctaccttggtagttaatagaagaggttggggggttgaacatggttggattacgacagatataaggttctctacattgtacacctgtattccgtacatacttaatcgatattccaaatagttaatcgaaatcagatccaaatattaaaaagcaaaaagcatgtaacatagttggctcttgtcactgagggggggaaccctatgtggctgggttgacaggtagtctccgatgggtcatttcagccctggattgccaaccccggtgattgggaatcgggaagggtgcagtcccaggtacttggtcatatatttacgcctctttcaatgcaatgcagcctttatcctttatcattcctggtacgtgagttctgcaacagcatacagtaggtagggggagaagagaggcctgaggacacagtccctacataccagcgctagcttgggttactttgctgtggatcgtgtaccccatactccgtacaatcgaacaggaaatgaaaaatcgaaataaaggggaaatgtaacctgcagcaggagtgaatgtgacacatccaggttgtcggatttgatagcttcggggggaggcacttccccggttctcagagttttcgattgtatgcaggaccacggcaagataggtgattgacgcgatcgagggcgatcgcctcggggaagatcgaggtctcaattgtggtcctggtagctctgatgatctgcaggttagcgggttcagatagcacattgcaattcgcgaagtcaacgagctagcgaattaggaggcgcccctaggtcgactaatcaatcttgcattgctatctagaggatcagacatcaaatcaccagtgatggcgtccaagggctaaggccgcattgcagagatcgacactgcagaatgcgaatgtacttttgtttctttggctcagcagcgtgtcatacagctgcacagtatactccgctacatgtcaacatatctgcatgtacacagtacagagcgcgtgacgcaggaggtatgtacgatgtacttcgatcctcaggcatgatcccccgtgcaggagtacctcggggaacattactccgtatccgttgacacacagcaagtggccgcggatcgcccgaccaaaagccggtctatatcgacgtgggtcgtacctgattgtatctgtgtggctcgatcagtcataatctcctccttcgtgcgtcatgtcgtgacaactaaaataggtccaaagtaccgaagtcaggggttgacccagggaaaaaaaagaaaggggacgatcgaacccggcacactggtgctggagctgtggagctgacgatcgtcagttttggttcttttctgcgagttaatcaggtaacccggtcattgatgtgggtatgggcctgtcacctcaggatccaaagagtccagagaggtctaaaaggtcagtccacttttttttccccttctttgttcggctgtgagctgccgtcgtgtctcatgtttcgggagtcgaataggaaggccggaacttggtggaggcgaaacgatttaccaaataaaaaggagaagctaggaattgaggcggctgaaaaaagcgtttgtctcgggacggggaagcggttccagttccaactgattggactttaatttgcgttctatttcttcttttgtccttctattcgacccatttggtccctaaatgccattgaataatagcggagtaccaacggaataccgactgtggacactacctaagtatagcccgttacaaccatcagctatggagcacatagtgcttccagaattttccatctatggagccttcctttgagagaatcggaaaaatgaatgaagatcgcccggcttcacatccgcggcgtcctagtgcgctatttccctgctcctatccatagtgacatttggattgtacgttgtaagagacgactccaacgccacacacccagaggaaaaagtaaacaaagtcgagtcgatatcccaatttcaggagcgataacacatccacatctgtcaaaaagcaaagagtccggctggggcccgatgcatccggaccgggaacccccctgcatcctgatgcgctgcaaggcaaatctccaagtcaatgcgggtggtgatccgcgaccgttttgtctcgatatctcgacgccacaatcaaggcgtatgcgggtagctacgatttccagattcaaaccaaggaatgtacttttgagaaagatcagtgcaagataaatacaacatacaacagtgtacgtaccatggatcagccccgggaagactaagacgttccggaaacgatggaagccggttcatgcaatcgccccaaccttgttttcgaactaatgcaccctccctagactttatctcggcttagtacatcatctagaaccttggaacatcgacaccgtatgaaccgtcgtcttgggtcatgcaagatccagaatccgttgggttcggacgtcattcccaacgaggaaaaagggggagaaataccgaccaaggctattaaggttgactgtgagaggattgagctgatggagctgatggggtcgatggagtcgatggggactgatatggggactcttgtttttctcccggttctagcgcccttctagctgtaattgaaacggcttctttccgtacgataacagttcagttccactataggaagctggatcataggctttttttctttttttttttttttttttctggattaggacatggaaatatgtttttacacattagggtatgcttgtgacttcttttcctcaaaaacagttgatccacacgatgctctccagtacggggggaagtatggagtagttttcccctattttgaacatgtggaaacgtgtcactgggagatacgcctgagataaagacacgagagagaatgtcttgttccaataatgagaagcgtaacagagcaagccacaatgctaggatgtagaggtgagatcgatcgaacatggttacgttgagaactctgaatctcttaacggtagccatgtacggtagatcttccagcccccgatttccacgaggaagacccagattcaagacccgcgggagaggaagttcctccattcggtatggtgtggacacgggctgaaacacgcctacgagtccctttcacaagcctagaaggtcgttaatgtgaaccctgtcagctgggggtcactataccgcaagagggtgattgtggctgaccgtggtgagatgtgtcggccccagtgtggcaaattatgagagcggatgcagatacccttgattaccttccagagcctagattatggattatgggggtggggcttcctctccgaatgtttctagatgttatgtgtgatgtacggaggacggagtacatcctgtacaacacctgcggacaccaaggttcttcattgtctctacccagcgtgccgggaacgaaaagaaaggctagaaggcgaaaagaatgttcgtacgtaaccgagacgggattttactttttcgatcattacgggggccctccttttgcttagtgtatctccaccccctatgatggagcccaggatcgtaaagataatcctcttttcttttttttccccttcttgattggggcgtagggaatcatcagatagacacgccgggaatgaagtcaaaattccgatatgttggaattgcttttgataagtcttgtgtctggttgattgcgaattgtaggcgaatcgacgaggatttgatcccaagacttccgggaccagacccgaagtttgcgactggtcttactaagtgaggattgcacgggaggccgcctgaaatacggatggccttaattaatagccgaaatacccttggagggttggattatttgcatcatatgtcataatccgttcgctgttggggttgtagtttcttgcctcttgaacaacgcactctggactccatatacatacatcatgaaaacgaacaacaccgatggagccacgaccacgcgagaaatatagaaattaaaaagaattaaatccaatgctcggagtgatccgtttctcgttcctgcggctgtttttcccttttctgttctccacttttgcacaaaggctgcccggagatttggttcctagctttatagtggagagcttctatggctagttgatacataatagagagaggtctggacttctgggacctgacagtagtgaagacctgggttggatgtatctcgtggaattgtgatgaatccaagggtacctttttagcttgttttggtgtcataaaggaccaaacaggcgctatagattagaacgtttggagaagaaaggggggacaaatccgttccctattccccgggaccagggacgggagagccgctgtgctaaacaaagaaatggaaatatagaaaaacatagggaaaatcaacaaatcaacaaatatatgaattatatcgaatataccgaatatccaatatcaattatatactattattttcttttcctctttcgatttattatattattaaaaggataaatctaattttgattccaatgcctaagggaaaaaaaaccgtgtatatcaacgcaaacccccctcccttcttgtttcctttgaacatacttgataaccatctttctacacatccacccccctacagccctcctttgctctcccttctcccttgcgatacgtcgatttgaactttttccggatcgaccggagccagttccggagcactttctccttggctcccttgccgtcttaaacctcatatcccttctgcccgtttttcttggttgggattgcgactttttttttttatggattcgctgcagccaccctcgcgcgcatcattttgaatatttcgattattccttgatttaattctccatctctctactcataaaaagcaacgagctgcgacctgtccaccgactcgcttctctccccaaagactccattctcatttgttgggcttcgtcacattcctgccctacgatctgttggaacccgcactggtgccagtggtgattcttcaaaaggaccgacttttccgatcccgactgcatctgcatctatcgcctgcaccgctggtttttatctggatctgattttattctgttaattcgattttctcaactgggggttggattggcatttcgtttgtccgcgcttgtttccccaagggaaacatctatataagatcctggcgtcgacgtcgtgtttacttggtaagtctttctacctcattccccactctctgccattagcgccttggaactcgcacatctcttttctaccaaaattcctacctttcagcatctaaccatgattgcctctgcagacctgaacatgatcctgcgggacctatctgctttcaacatgggaagaggagcttacgatacaactggcgtgaagaagcccggcgtgcctccaccaccaccgaaataaatccattcggaaacatacccttcgtcatactcaacattgctttctacaccactcggtcatgtttcggatggtctggcgcccaacagcggctggagttctctcttttttattttttgacacatgcggtttggagttttacgtgattttggtaagacatgtccactccgagcacacctttgggcatcaaaactaaccgaattgccagagatctgtaacactatcttgttgttcttcgccccggtcacgggtcatacgtttttctcgcctattcgctacagacatcgcgcgacaatataccctatttaattttgctcgactttcgccagcattttcttttcggataccaagcgttggcacattttctccccctctttccgaccttttgatctttcgtctccgcacatgagccttatccttatttttcgggccctcgaaccttattccgcctaacctcacgttcttcacctcttgacacgaatcgataccacggtcctatttctctcaaaaaagtgcctttgtttttatttgtttttatttgcatctcttttgtctctgtttctcgttatcgaccggcgttttggtatagacgggatggaatgttgaatgggatgggctgataccaaaatctagagcctcgacctcacggtcaatagcatgctttgattgctttcttgttttactattggatgggtacagctcccgggtttatttgcatgagtatttgtacttttttattttgacgttgatgcctgtgtataatattttgcgcacaaaaaccataattgtcagcgccaatggattaatttttctctacattctctatctagccagtctagaccaccatcgacttcacttgcagtcatagatgcgctctgtaaccccgagtttgcaaactcgcactcatctcacgtcgtacttcgcttgtacttgaccgaccgcggttgcgctagcatcgggcagatttgcttgccgactaatgccgagacaggaacgacagcccgattgttgatgcgggcctagctagtgcgtcgggatattcccgagcctgaccagggtctttgctaactggcgcccgacatcatcttgcaggccagctaggctagtgcccaatctgcgacagctgtcaaggtgccaggaacctgtttgtctcccgctagcctactttttatcaagtcatagtacacgtatttcgatgcactctttttcaaatcttcatatccatgttatctgcatgccatcggtgcagtgtatccaatgagatgatatgaaccatgctggaaatcctggaacatccaatttaggtctgctgtgagtttctttaattagatacgaagataaactaagcctcaatagaagtatgagcaacgcaaatgcaatgctaggtgcatatgtcagttgtatacttcaaccttggacaggcctccccgtgactggtgactgacgaccgcgctaagcccaatcgaggcacccatcatcatcatccacctccgcctctctccaacttcaggttcaatcacccttgtttcgacaacgtctatactacgctttgcatttctcattcctcgaccaggatttaactactttaccaatactaggcacaagcaacgcctcgtgtcccgctgtcctacccccagacagccccattcctggcactgtggctactagctgaatccacctgccacctcatccggtcgcctggtcgctgatcgattgacagtgaataacgcacagaaggacgcctaactgtcacctttgctcttaccgtagtttcgttgtctcagccatgtccgaatcagcgaacgcaaatgccccgaagccgagcagcagcgtcaagcttgtgctgctcggagaggccgcagtgggcaaggtactgctctattcgtcatgttacatgattttgacagctaaccgtctcttgttattcgcccatagtcatcgcttgtcctccgctttgtcaacaatgatttccaggagaataaggaaccaactattggcggtaagatttccccatggacttagccccccccccacaggatacaaggtactgttcctggcagatcataaactttttggagaatccagggacggtgtgttgtatccaaaattgagttgttccccgcaaacggggcaacccggccccttaataatactttgcactagaataaccatctaacgtcgtctttccagctgcttttttgacgcaaaaatgctcccttcctacgcgcacgatcaagttcgagatctgggacaccgccggccaagagcgattcgcttcgctcgccccgatgtactaccgcaacgcacaggcggcgcttgttgtctacgacgtcacgaaaccctcttcgctgacaaaagccaagcactgggtcgccgagctgcagcgccaagcgagccctggaatcgtcattgccctcgtcggtaacaagctggacttgaccaatgacggcggagatgtttccgaggccgttggcgctacacagagcgagcctgagtcggcccaaggtggagatgaaggtgccggtgaggaagacgaggggcaggatgtcgtgtccggcgatgctcgcaaggtatcgacacgagacgctaccgcctatgcggaggatgagggtcttctgttcttcgagactagcgccaagaccggaaccaatgttgtggaagtcttcacggcaattgcaaatgccatccccgagagcagtctgaagactggtcgcggtaccggtgccggaactggtcagacttcgttgggtaatcggtcagcagaagactcacgggtcaacctgggtgatcgaaatgctgctacggctaaggaaggctgcgcttgctgatttgggtcttttttttggcagatgtttttgcaattatttccatggatacgggcgtccttcttgctttttttgttgcttgttccggtttcgatggagactccgtgtgctcttatagtacatagtgtgctactctccctgcagcacctcgtttcagcaatgattagagtgtaaatttttgagattggcattggcaatcagaaatcatctccagcgtacctacataccgtgaagaataagacaatatggccagaaagagtcccggggtagagttcttgactaaagacgagtcggatagtggatccccttcagcggcagccccccaatcagcaacgagccctaagacggacacgctaaactaaaacaggaaatagcgcgccctaagcgaatgcgccgatcccacagcaaattcccattcgattcaatctgcgaacctcccctccgtcgacatcaccaccagcacttcccgcagcaccccgtcgctcgcaataatggctgccatcaacaagatcgcccccaactcgccgtcccggcagaacccctccgagctggagaccgcgatcgccggcgctctcttcgacctcgagagcaacacacaggacttgaaggccagccttcgtcccctgcagttcgtctctgcccgcgaggtaagaattgttgtccgaggctcccgacatacggattgaatcgttctggaatggcgtctgtgaattttcgagggattcgatgctccggggtatattggttgaatttgtggattgatttcaattcttatccaccaacaccaaaaatcatcaatatgcagaggaatcatcaacaaaaggaggcaatatacaaatggatatgaaaattcgcagagcaagacgccgttccaagaggaattctgtttctgtgtgcaggacactttcaaccggacaacgctctgacattattctcgctatctaggttgaggtcggccacggcaagaaggccatcattgtcttcgtccccgtccccctcctgaacaacttccacaagatccagcagcggtaagcaaccaccaacccttccaaccccaatgggccaaccgaaacaaagccactcaaaccaaagaacaacccggactaacacccgcctccagtctgacccgcgagcttgagaagaagttctccgaccgccacgttctcttcgtggcccagcgccgcatcctgccccgccccaagcgctccgccaactcgcgcaccacccagacccagaagcgtccccgctcgcgcactctgaccgctgtccacgacgccatcctcaccgacctcgtctaccccgtcgagatcgtcggcaagcgtacccgcaccaaggaggacggctccaagaccctcaaggtcattctcgacgagaaggagcgtggtggtgtcgaccaccgcctcgatgcctacggcgaggtctaccgccgcctcaccggccgctccgttgccttcgagttcccccagagcggcgctgagttctaaatgcacatttagaattctttgttcactttgactttttttggggctagggggcttggaatgtgctcggctgatgcgtgggagaatggcattgtttctaggttttgaattgttgcttagattcaacgccattgatgggttccaaagagatgatctccataaaaaatgcattgacggttttttctcttttctttttttgcccccagtcactggttgcattgctttgtgtgtccggtgtgagctctgggtgaggcgatggagttgagttctctctctatctcccgatctaatgagggtgggatggaatatctgatagtattccaattcaacgattccgacttttcattgcttctttagatgttttgtctaggattggatctagcctgctggtagattataggcttgattacccctggacaactagatattgttggataagtagctcatctgctgttattgacttggcagtatcagacccaaacgtcactagacgatatgtattatgcgatgcttcatgaacgggaaaaaggtacactcgggggtatgaaaggtatacaacgcaaaccagtcgacgcaaaatatgaacaaaacaatgacatcccctatttatctacaacgaagcctgaattcttcccacaccaagcaccatccaatatgccaactccctggtaaccttatcatcaggcttagatccctttccgacattctgctgatcaagctgtgcatccgcatcccaatccatatgcacgaacaccggaatctcaagcacatcctcatcctgcctggaagccgcaatcgccgagacatccacatcattagtctcggtatccgcatcgccattgccgttttcagcactactcccaggcaaggtaccagggacaacctccaacacgacggtcgtccagttccggcccttgtcccacaccttgcctgcctcggggactccgcgttgagcgccggagcgagactcgctcgttaagggcgcagagccaccctgcaacgcctcgtcccagacatcgctgttcgcgccaatctcaaactgcggagagagaactgtgactttcgttgcaacgcggcctggggttacggggggcgtggcgagggtgatgcggacggggtcgaacatgtggttttttagcgtaagaaggacgtggattgggcgcaggggtgggagggagttgaggtcagaggttggggccatggctgggagggctgacgtggaagagagggccagagggcggagggttggaagggggatgtagctgagggcaatgaggcggatgcggaagcgagtagattgcggcttgctctcgggcttcacgaggatgtgcttgcaggacttgcagcgcttggctcgcttggtgcggagaaggactgggagtgggaggagatcgtcaacgaagcggacgtccggtgattgggttgcgcgctggtctattgaggccatgccatcccagccacattctggagactgaagtcgtgcaataatgtccgcttcgttgttttctgaagcgatcagaaggccctcgcttgcagtcagagcttcgcgcataacaggtggcttggatttgggcttcttattgccgccatacagtccgcttagacgcgacgaggtcgtatacagagacataagccggtttagggcgcctggcgaagagaatccaaattccgagctaagacgatcatttgctgaatttgatgtctccgcgatttgtgtacgatagaagttcttcagggctgcgaaccgggcatccatgcccattggaggtgcagccgggtcttcttttgatgcagcttgctctccatctcgctcgcttgcgttggattgcccatcaatagaggcatagctagacaacggatgtttcagatctccataagagcgagaagcttgcctcgagcggtcgaaagaagcaggggcagtggaatctgtcatcttttgcagttggctgcggatattagtcggcttgtcgaatttgatgccaatgtctagtgttgtccaaagacagtatccgcaagacaacacccacggaccctgttgaggcccgttcccggtggcattctcaatggtagtcacagccagcggggccgtacagacaggacaattgaagcaatttcggccacacctagtgcgtgttaacggatagtcgaacacaaccctttacaccctagtacataccgattgccatcactccgcaccatactgctcggcgtttcaaacaagcagctaggacaataccagctcacaatctcctccgtgatacatcgggggcatttgatctggtgacactcctcgcagtagagaagctgttcaggcggatacagcgagaagttggaccgtggagagcggggatcaaatgtgtgctcttcatcttcgtcctcttcttcttgttcgtcttttgctgacaatttcttgtcctgatctgtattcgcttgctccggtggtggtttctgcgtggactccctcgaccttcgcttcctagccggatcggggaccggggtgtcggcgcagggacatgatatgtatgtatatggaaaaggacgtgacattttgatattgacgtggaggagcgagcgagatgttatgtggtagcttttgaggtgtgtacttgggtcaattcatgactcgtctctgtggggtcgagagcttcgtaatggagtaaacaggttgactggtagcaaattcgtatcttttcgagtaaaaatattttatttccaggatcccgactttgttgcgccaaatcagaccctgagcggagcgtgttggcgcgtgggaacttgttggagcagggggtcacaatggctctgccacgcccaatgtactatgcacaatatagtcaatatgcacaaagtagaaattaaaaataattccaggccaactgtctccaaagcgccaattttcaagaagtccacagtttgcggagagggagctcttccgcatcaacaaccgacgtcagatcccgccattttctgcccgccatcgccgcaaaaccatggacttgcatgcttgaaggtgtagaatcctccatatccattccacagccacaatgatacccctacgaacatttcgtgcaagtctctcaaggcaatgctctgctccaacaactactatccgaaaatatgccagccagacgcctggtaacccaatgcttgaggtcttcaatcgcaaagccaaacacctccaaaaagatcgggcagcccggaatgtcgaacagagtcggaatgtcgactacctgaaagatgaagtagcaatgcggctatgcgagcgcttactggtaagccactcaacgaagcaagcgcggacaatagtgcaaaagtagaaataggacacatcaactgacaagagcttctatcaccatgaataggacatcaaacgtgactttccaaacgttctagatctaggcgcaaacagctgcaacatcgcccgagctctcacatcccccaatatcgactcagccatgccggaaggaaccatcacaccaccactatcaaacaagatctcaaagctcacatgcgtggagacatcgcgcgcactgctctaccgcgacgagaacgaaccgtttaacaaggagatcaacattcagcgggatgtgattccggacttggagacgttgccgtacgcaccgaacagcttcgacgccgtgctatcgtcactctcgatccactggatcaacgacctgcccgcgctcctggaacaggtgaacacaatactgaagcccgatgcgccgttcatcgcggccatgtttggtggtgatacgctgtacgagctgcgcgggtcgctgcagctggctgatatggagcggcgcggcggtgtgagcccgcatgtgtcgcctctggcggatgtcaaggatgtcgggagcttgttgagccgtactgggttcaagatgctcactgttgatgttgaggacattgtggtggagttcccagatacctttgcgctcatgcaagatttgcaggcgatgggcgagggtaacgcaatcatgaaccgtgaatcggcaccgctttcacgggatgtattgttggctaatgaggctatatatcgttccatgtatatggaagaaggtgcgcgtggtatcccggcaacgttccggttgatctacatgattggatggaaggaaggcgagggccagtcgaagccgttgcagcgtggcaccggcgatgtcaacctcaaggacatcctcgagggaggtgactttgataaaccataagcaatggaaacaaaagggcaaatagaaagggcccaatattttgtcacaatatactaatgtaaaaactacgcttaaggcgacacttgagagatatcatctacagacatgtatggaatgcaaatcaagcttctaccaggaagacgagaacaaaaacagtcagaatgtatatcataagaaacgaacctccatccgatgttgtttgctccgctcaaaccgtcctacgatcagtcatgacccgcacaatcgatccagtaccagcaatatccacaagcctctcgtgccagctcagcaaaacgctcatctgctgcccaccgccaccttcacccaagttgcgagcctggatctgcgagaagcccgtatcctgaggcgaaactggcttcttcggcgactgggcaccgctaccgggagcagccgaggacattcccttgtacctgtaatcaataaatcagcaatcaaatccatgactttccctccgacggttcctctcctggcaatcgagatagtagttccacgtacaggtatttcatcaagcaatcagcccgctcagcccctccatccccgctgcacacgccctccaagatgcgtgtcatctcgccctgtcggataccctgcagcacatcgataacggtagcaagatgcacctccttggcacggtcgtcgccgcccagcggcgcggtgtcgaggacagtccgcagagcgccctctgggtcaccgccgcgcagcatctggcgcacctgtgttgcggcattggcggcgtcactggcacttgcgggttgggggagtgtggcggggaggagggattccatggggaagttggccgaggactcggggtccagggcgtcaatgttgatggtgcggtagttgatttgcgacatggtagcggttggggtttggttgagggttgaaacagagtagcgttgggtctcgatcaaattttggctaagccagtcgaatgggtttggtgttgaggaagctttgtggggagctacctgtttccgtttggtatatcggtgcggtgggcggaagcggggagattaggttgaacaatgggaaggcaacaatgtccagataaaaatgtacatgagtataattgtctgtgggagctgatcgctctgagatctaacttctcctatagaatctttacataatcatggcacgtggctaaaatgtgccatttctagttaacaaccccctgggccggtatagtcgcctaaatgtcacgatgcagttgtacggatcatcgtgatgttgactgtttgtcttgtttgcttgccatttgcagagcggccagctataagcagattctaatatattccaatgattattttaatgcatattcaataagcagttcatggagcagttgatgaagtagtcgatgaagtattgataacaaaagggacttaattttgttagtggcttacatacaaattgcaggtacctaatgtcattgcatagggagttcgacacgaaagcggtgtataaagtaaaaggcggtgtgaagagggataggcagaaacagggtagttacccaattaggaatgtgcatctgaaaagtcaggcgggggttaaataaatcttcaatatatattgggagagtgctaagatatgatactaggatactgggtagaattgcatgtatcatatattctaggtacaacccatattggggtacagcatagaattggacccaagacccaaagtgggctgggctgggctgggttgggtcgtgggttgtgccgaagtctagttacttcgtatttaggtaggcttatagaaggaatagttttgggattacgtactaggatctagcgagaaatacgtcttatacttaggggtacgggagcccatgatcgtatttagatactctcgttgaataagatatatagacacatcttctatcaaacccagtgtttttttgtacaaataacacaataaaatatcaaacagccagcccaacgctaataacacaaacgctaaaatgacagctaaggagacgtagtaatcgtgatagggggaatgacgacaggagtaggcgtggccagacgctcaggagagggcttttgcgtgttcagttgtagtctctcaggagcttcttcaggatcagtagactttggtttcaactcgagttcatcttctgacttccgcttgttgaaaatacggcgagtgaaacgcttcacaggcctaaagaaagacctgatgcctcgaccgattaccttgcaccccttggaaagcgggcgcaaaacaacagccataccgccaacaacggcattgaaaacaagcccgaaatagtagtctgggataagtcggagcacgatagcccagggcaagcaggcaatagaacagatcaaacacacgccccagagggtgccgttcaagcgagtcacgttgaatgcctggccgcccacgaagacgatcatgacctggccaccgatcatgatggcgttgattcctaagaaccagtaattgcggaacatgccttcgaagatattgaacttgttgtcgaggcggcgattgttgaattcgttgaagatctgcatccacacgaacgtgttgaacaccacggtcgagagttgtttcgcgcgcatctcgggctcggagctgagatgggcgttgaggagcttttcgcctgcgaaataaagcatgaatgtgatggctagctggtatactgcttggccaagaatcatcttccacatggtcattgtgaaaagggaggcgtgtttggagacaggcttgcggtcgagaatcttttcagtcggggcatccgtggctctgattttccaaaacattagcgagaggtccaggggaaatataagaggaaaaacacgacaacttacaaggcgagagcggcgaatgtgtccatgatcaggttcacccagagcagctgcacagctgtcaaaacactggtgttctcgctgctgtacacagatgacacaaaagtgaggatcacggccgtgatattgaccgtgacctggaattgcaaaaacttggcaacggcgtcattaacagctcgtccccaagcgatcgctgtgatgatggacttgaaattatcatccaggagaataatcgaactcgcctccttcgcgacctcagtaccagcaatacccatggagaagccgacatctgcagtccgcaaagccggtccgtcgttggtaccatcacctgtcacggcgaccgtttcaccgagggccttgagacgttcgaccaagattcgcttgtcttcgggggatgatcgtgccagcacttgcaggcgcggaaccacttcatccatctcctcgtttgtgagttggcggaacttgggaccttccatgaccaatccatcttccgtcttgattccgcaagaagttgcaatagcagtggcagtggcaacgttgtcaccagtcaccatcttgacctggacgcctgccgagtgacatttgcgaatggccgatgggacttcggggcgaagagggtcttggatacctacaactccaacccaagtcatatcatggaagaaatcctcgaagtttgctgaaggatcctcagaatgtttggcttcgatcggtggccagcttgcgaagtccttgtagactatgccaatcgttcgaagagacttgtgggcataattgtcgatgatctccagaaggtttttcttttgttcgtcagaaagctgctccacatcgggtctctctttggaaatatcaatgttgacaatttctgcggtgcagacgccgaccatcaactcggacgctcccttgacaagcagtcggtagccagctccaggaacacggtaaacaacacccatgcacttcctgtcggagtcgaaaggaatcaattgggtgatctcagcggagccacgctccgagacaagatccatgcccatataatccctagccaactgaagcatcgcaacctcggtcttactaccgacaaaatcgatggagccgtccttttcccgttcaaacgcagttgagttcaaagcgatgctcttgataatcaaatctttgatgggagctgatagtttctgggagatggccgaagtagtcattgaaccttccacatcttcatcttcggttctctggctgaagttttggttcgagccccaggttccggccacaacggtcattttgttctgtgtcaatgtgcctgttttatcagagcagatgaccgtggcgtttcccattgtctcgcatgcgcgaaggacgcggactaggttgttctccttgaccatacgggtagtagcgaaggccaaagccagcgttactgctagtgggagaccctctagcgaagaacatggatgtcagcagggctcagatgattgtagacatcagcacttacctggaatagcgacaacaataaccgtgacagcaacaataagaatatccacaaactctttgcctttcacagcaccgttcctttccgggtgattgggcagatcggctacaaatcggaatagcaaaacaaagaacagaataccagcagctctgtctcaccatcagtaacctgtacaacaaaagggaagtatgaaagtcaactcacgctgtacccaaatacccaatccaatccgccaacttacccagcttgacttgaagcggcgttgggtcattaggagtctgcagcgacaacaagatccgtccgtaggtagaatagggtccaacactggtgacaacataagttcccaacccttcaaggaccttgctaccggagatcagaaacgggtcgagtttcttggttgccttgccgtcgacaatttgctgccagacttcatggccaggggtcttcttcatttgatccgactcgccggtggcggaagactcatcgcacttcaccccgtagcctgaaactagaattccatctgctgggatggaatcgcctgcctcgagatggaggatatcgccgaccataatatcgtagattgaaaccatgtcgggtttgcctgagcgggtgacttggacttgacggtcatcgttctgttggcatgttagctgtgctcagtttctggattgataggggaagacctgcccgtttattgagcttggcaaattgtctctctttttgccaatcgttcgcagctgtaacgattgtaacaatcaagattgctacacagatggcgactccttccacccactggacgcctgtgccttccgacacggtctcgtatatccccagggatagcgagaccacggcggcaatggtcaataatataataattttgtcattatatgcagcccaaaataatttcaggaacccggtcgatttccgagcaggtagtttgttctgactgaagacacgaatgcggtcttcgaatggtgaaccatgaccagatgacaccggcgccggcgccgaggtgacaggttttgatggagatttttctgtagctgtgtgttgcgctgaaggtgccacatcctggaactcgacattgccctccagacacccttcatcaattgacaaaccggccttgagatctgttcgcagaccccgctccagaccttgtaagccaccaagagcatggaatgcagccaaggactttgggttctgcattttgttcagttgacccggggagaacgcaaaccgattatcctccacctggaaatcggcttcattcctcgggtccggtctcaaagcatccgacagcgagacatcgtcgtagacatctttggaagtatgggtcgggtctacctcggagttcgcccgcgaacgaactacggtatctgctgaagaagcgaatgaatccgcccgcggacgcaatgtatcgccatcgatcgactgtgacagtcgatgcgaggcattttgaaccatcagccgagctgggtctggtgggttccacgccatatctggtgagacaggagaagtcgggctgtgatttagatctgtaggacccgaccatgcagaagaggctgtagacatagatcgctggaagagaaagaaaataaaacaatcagcgacaaatttccagatgtttatagaatgatgaaatagcttgagtggcctacctctctgcctgaaaagtccgtcactataacaggactcaatagcgagccctgataggaggggtcattgtttgaagaagacatcgcacggagttgattccgaaaaggatatgcgaattaaatgtaaaagcggctcatgaagatgttcatgtaatacgatctgatatcaagaaatgtctcgtgtgccgccggggttgcgagaccttgttatctcttcccctctcaacggggctgtgtattccaaggatgaatgcccagagacgccgaggttttcgtcaattttccgctggcaattcgcgacgagcgttgtcgagatgccaagtataagagggaatattttattatccacctcagaagattggagcgatccagaaaacgcaaaataatatagactcttgaagtggtgccaggttgtgccacttattaccccgtacggcactgacacagcccccttcggaggttgcaagcggttatcttgatcacggagctccgtgtatgatgtagcggcagtgtcaggttataggggagggcgaagctcataggcatccatacctgaaaagatgaagaatataagcgctgggcttctttcctgtaactatgccacaattcttcatatccatgctacgtgaatggcgaaacgatgggatcagcagccgtcgaatagcgttacgccaagcgcaggtatccaatgcgagggcgttgcgcactcattgtggataggccaacagctgctgcgcctcggagatgacccaatcatttggcacattctcaccccgacatattggcattattgtttggccgtgagcgcaagtaaggaggcaaagacgagtctcttggcgtcatggtgtctgttctaggttgttggagatggggtaggtgtccacttgatgagcggctagactgtgcgcatcatgaatacgcggcgccgctgtcagaacctatcaagcacacgagagaaatgattattatttactttcgcaactcattacctaggtagtaatttgttgaggtttctaggtgaaaggggcggacagggatagctttcgtggagtattgtggcggtgcttaaaatatgtatgtggcgatcgcctcatactgtggctggaggctcatgagctctatgacccgggaggcaagaaataacttggtaagggcagtgcgataggtggcattcataatgggctcacatcaagaaaggggctactccgaggctcttgagtagctaggcagaagcagtacagcccgattttggtctcaggagtcaggacgcgtatgtgcgaattcagttgagcaaagacaatatcctaagcctcatctgacacaaatgctgagcagtacctgcggctgctttcaaatgtatgtcatcaaagttcgaccttcgatttaatgcttgaaattgttttctttggaagtatggctcgtttttgcgacgccgaggaataatctcgttcaactcatcaagcatatggtaatatctaatccaactgcagtagctagtctcagacaacaacaagatggacgtctgacatgtcagatgatgcagtccttgatattggtcttgccacgtggtcagcatgcatcgttggccatacagtggaatccgtgccccaaggcaaggtgttacacttgtgtcagttacatgtagtgaccagtccaagactgattcctcttggcagaagctatctatacgtatggagaatgcgtgacgtttcatgtgcgaagctcgatgactttagattatcttgattatccgagctgatagtgtttaggtcttgattcatacatgtatcatactaagacgaagtaatatatccacaatgatgcaaatgtcagaggtaagtgagaaaataatgaagagaaacgaattcgaacaagaagaaagagaaatagatgaatagaagaagaagaaagaaaataaagatggggggtatcaatagtgaaaaagagaatataacgacaaaatcacaatcaaagacagtagatgcgcttttacagcagcataaagaagtagatcagtaaataataacaataaaaaggtacgatcggggacaagccccggagtccaatgtcacagaaggcctgcgaccccacccatcacttcatttccgtcatttcacatgtcccatatcgcaacattgacagttactgatcaatgacctcagtaaagcgactgcttcgactcccgtcgaaactgtgaagactgcggccgagcccatccggccgcggcggcaggaacggcactgcactctggggttgtgcaacggggtgagccggtgtcacagtgatcggagtggaaacgttgaccgtattagagacagggaggtgcggaagtttgggccgtgtcggtggggtgtgttcctcgacctcgcgggtgtagtttgagtccaggggcacgccatatggcgaggttggtggaggagcatagaaggagggtgatccacttggcccggttgctggtgagggagtagggaagcctggtgcagtgggagaatcgccgtctactccgcccccatatccgtctccaccatgtgtgaagacgggaggaagctttctaccggaaatcttttggaacccgcgctcgctggagccagagtcgacagtgcttccagagcgcgttgttgccgtcgactggcgccagcgctttatgaatgcgggggcgaggtacctggccgtgaagagcggatcattgctttcgcgccgctcgaccatttctctagacccagcaccggcccctaccccagccgcagccccagccccagccccagccgcagctgctgcgtctcctaacatgttggggcgtcccgctttacccacaagaaatcctcggcggcggaggtagtaaaataaaagaaaaagaatgagagcgagaccggcaactgatcctactacaccacccacaattttaggtgtgtcgggattgcttgtcgaatcctgccctaaagcgtgcgtttcgcttgaagttggcgcggttcctgtgccagttgctgagccggttgacccagagcctccatatacacctgatgaagaggttgtctggcttgtgctggaagccgagctcgtcgaggagccggcgctggaactgaagctggagctggagtcggtgccggagctggagttgatgctggagctggagacggaactagaactggcgctggaactagcgcttgaactggcgctggaaacagagccggaactgaaactgaaactggaagcggaagcggaagcggaagtagaaatgtaaatggaagtggagttggagctggagctgaaagttgagctagagccggagccggaggagcctgaatatgaccaataattgtgcgcctggggtgatgttgtcgtaacagaaggtgtagagctagaagaggtgaggaggcgagtcgaagtccctgtaagcgaactggtgattgtggctgaggcagatgctaatgatgatgtaagttgactcgtgcagtttgtggcggtcaacgatgtttgagtggagttcgagaagcttgaaagcgacgttgcagatagtagttccgatgtcggctgggtaggagcaggcgtcggtgaggttaaccctaaatctatagaggcactcgcactcgcactcgcagtcaaacttggactcgcagtcgtacttgcaatcacgctcacagtcgagctatccgagctcgatagagtgtcagtggcgtaaatagaacccgatatcgtcgtcggaaagtaactagtagtcgaatgaaaaggggtttgtgagctagcatcgactatctgcaatacagtactgatactagtcgggtcgacggaggtcgactcgtcccccnnnnnnnnnnnnnnnnnnnnnnnnnnnnnnnnnnnnnnnnnnnnnnnnnnnnnnnnnnnnnnnnnnnnnnnnnnnnnnnnnnnnnnnnnnnnnnnnnnnnnnnnnnnnnnnnnnnnnnnnnnnnnnnnnnnnnnnnnnnnnnnnnnnnnnnnnnnnnnnnnnnnnnnnnnnnnnnnnnnnnnnnnnnnnnnnnnnnnnnnnngtcgacggaggtcgactcgtcccgcttttcaaatattgagtcggattcgtccatgtcatgctcaagacacatagagtttttcgagtcgcaatcttcatccgcggggatatccgatgcggggatgatgggggtttgaaaggaatcatcctccagtaaatcagagcctgcatcctgtccatgaagctctgcttctaggcggcgcctggcgctaattagattgccgatgcgcgagtgacggaaatgaccatgagacatgttgacagttttccatacacgtcgtcaattgtcaatcacatgcaagtatcaagcaagaccgaagacgtatgatcctcacagaggttgagattcgcagtattgcgaagaacgggaccgataaggtttgagtaaacgaaagaaaaacacgtgctagcgtgcgcaaagttggggtagaaagattgatagatcgtcccgagaaaagaatgacccggctgacagtatgaatgaatggatgttggcaaagcgtagccaagcgatgtgtggatcaacaagaaaagcgcagtatggacagcaggtcaatgatctcgcgatatatggcgcacagttacgtggagggaatggcaatcgaacagacgactaggcggagttagtatgggatggattcaattgaggccccacgccatgtaagcaagccagaccgaagacgaccaacacatacctggagtaaacgagtgacgagaagagtggaataaaaagcaagagcgcagtctcacgtcctaatccattgtgttttggatatctggtgaaaccagagcaatatagagtgtttaatatgccgcgagagtaagcagatgcaaatcgacagctctgaggggcacactggcacgatcttcgtcgagaggaatgaatatacacgaaatggcaagcaaaaaaagacccaaaagtaaaacacacacaacaagaaagagaagcgaaacgggaagatgaaggaaaagacccagactggaccaaacaatcccctatcgaggcctagtctaggcgacccgtgttagtgacgaactaggctcgggggccgacagatcctttcttctttttattttcttcccttgaaattcggggaatagtatctgcaattgacttctgacgatcttttttttttataaaacgaagaaaacaaaccccaagagcagaaaaaaaaacaaaagccaggtcgctctccacgcaggtaccgccaggtaccgcgggagtcgacgaataaaaagtgacgaggccccgatgagcttctgaccaagggcactaggctgttctgggattagcctaccatgcaggtttaattatcatcggcttggccatcgaatggttgtatacataggcaagggacaagggcgacgtgcgtcagtgaagagattatatctttgtataaatgtctcttggtccattcaatctttcgaggaaaaataatgtgccatggtgtacggagtaactacggaggcacacactatatggagcacttacgttgtgctaacggacaatcattcgccgatcccattctccataaacctattttaagcctaggtgtcagaccactccgtgaaaaaatgggatgtatgcatttgactccatatctacgcgctcagctcgtcttatttgacacccgcaatggaaggaagacaagaaagaatagaagggggggtatttagtaacgggctttcctcctcacgggcctagaacacattttttcgcttagaaagtctcgagctcgtcggctggaatctcctctccttcggcagggatctcgaaaccgtcctaatggggggcgcacaggcgtcagttgggggaatcctcagggaataggtcaagggaacggacctcggtcgagtatagaatgccctggatgtgcttaacaagcgtgtcttcttccttttcaagctcggggtcggcttcaatggcgctctggagcagcagctcaatgtcgcgtagcttggcgaagtagaagtcgcgctccttctctagtcctgcgatcgcttccttctgtgtggagatctcctgttgcagggcagcggtggccgccnnnnnnnnnnnnnnnnnnnnnnnnnnnnnnnnnnnnnnnnnnnnnnnnnnnnnnnnnnnnnnnnnnnnnnnnnnnnnnnnnnnnnnnnnnnnnnnnnnnnnnnnnnnnnnnnnnnnnnnnnnnnnnnnnnnnnnnnnnnnnnnnnnnnnnnnnnnnnnnnnnnnnnnnnnnnnnnnnnnnnnnnnnnnnnnnnnnnnnnnnnnnnnnnnnnnnnnnnnnnnnnnnnnnnnnnnnnnnnnnnnnnnnnnnnnnnnnnnnnnnnnnnnnnnnnnnnnnnnnnnnnnnnnnnnnnnnnnnnnnnnnnnnnnnnnnnnnnnnnnnnnnnnnnnnnnnnnnnnnnnnnnnnnnnnnnnnnnnnnnnnnnnnnnnnnnnnnnnnnnnnnnnnnnnnnnnnnnnnnnnnnnnnnnnnnnnnnnnnnnnnnnnnnnnnnnnnnnnnnnnnnnnnnnnnnnnnnnnnnnnnnnnnnnnnnnnnnnnnnnnnnnnnnnnnnnnnnnnnnnnnnnnnnnnnnnnnnnnnnnnnnnnnnnnnnnnnnnnnnnnnnnnnnnnnnnnnnnnnnnnnnnnnnnnnnnnnnnnnnnnnnnnnnnnnnnnnnnnnnnnnnnnnnnnnnnnnnnnnnnnnnnnnnnnnnnnnnnnngcccctccactgggcgcggccactcggggacggacggcgcccgttgttggggtcaccccacggcgtgcgctgcttgcagacggggcgcgcgaagcgggggcggcaccaacagcgccggaagccttacgccggccgacggagtcgtattcaccaccgggatagtgctggtcccagtatttcttaacccactggaggaactccaggttgtcctgcatgcggcacttcgtgagggactgaacgggaatgggcttgttgacctggtgtcgggcgaagacgtctggatgattggatatgttaaaagggggatcgttggccgatttggaatccgccttcacatactctggagaatcttgaagttctgaaggtaggcatattcagtgttcacgttgaatttgacccgggacatgggaacatccactgaacaaagagagaaaccagtcagtatgtatcccgcaactcagtacgggcccgtttctctcgactattgcgccggtcgtattgattacatactgaaaatcgaatcgaagacctggcagagggcagcactatagaggaagataggaggtcagcccagctgatccatacaaaagagatcgccccgcgggccttttgaaagtcggggagaatctcgatcaaaccatacccagttccacattgctcaatcttggtaaggttcagctgcagcaggttattaagccatgcgagcagttcctgtctgaatcataaagcgatcggcgtcagtaaggccatatcggtcgcgagatggcggggaataggagaaaagtcgaacctggattcacccatgatggtggggtagaataataatcaatcgaaacactagaggagaaaataagactgggataagcgctaagcgggaaaagagctggatgaagatatgacacgcgagaccaggacttcttgtcagtctacgctcgtgtggttgatgggaaacagcggagggattgttttgatgctaaatcccacggatcacactggcgctagcccactttttctggcgaatcatagctggattagttaagcacttactgatgcctgaggtgtctacttgtacctgagctctcacatcgtagcctaagatattacctcggtgcatgaaactattatatcgtcaagtgaggcacaactccattacaacaggtcaaatttcatatatcgtatcacccaccatgctgtcgctcagtgtatcgagttatcacctctacttaaccactgaccgccctttctaccgtcttccccgccgccatatttgaccggcagaaacggtcgatctattgatcttgtagctgccttgtcgcctcaggcgggtagccgcctcttttgactttctgtcaaatctttaaacagaaccttggaatgtgtacagcttcataatatttctcgtactccgtagcatgtgtgatgtcttccacgagtgacagcgacccactacaatttaaccgataaattaagaataaagcgaatatacaatgagtccgagtatacgaataataactgtaataatggttcgatatatatagatgattgagtggtatactaaatatataattttgcaccagttcatatgcgtataacaaagaacaagaattcattctgccaatattccaggccctgatccaatttgtatccaagacggaaaacctcatatccaactcccataatcctagcaatgtataatgataatgacaatgacaatgaccaaacaaacccacaaagggaaagaagcagcgctgaaaagggggcatgcggtatataaacaaatgcaaatagatcactcctctaacaggtcgatcccgtctatgccatatccaaagtccataatgacagcccgggagtcctggctcgtcgcaacaatgcgtctataatcggactgtacgctcaacatccagcttgtagtccagccagggaagtcgatggacatattacccgtatcacggtcgaacaccttgacgctcatgtcatagctaccgctaatgatgcgcttattggcgctgtcgagatgcagagatcgaatgagacctgaatgcccgtgcagctcattgacgagctcgcccgtgttagcatcgaattgatagattatgcggtcgttgccgccagtgaggatggtccggccatcgtcactgaattcgacacacgcgaggccacggtctttgctggtgaactccttgacacattggcctgagatcacgttccacatcttggcaacaccgtcaccgctggctgacacgataaggtcaccgcggagctgcacagcattcactggtccttcgtgaccgttgagttgcctcaaaagcgcaccggtgtttcgatcccagacacagatggtagtatccttggagcatgatacgatgtaccggtcatcaaagcacacatcaagcacaccggcttgatgaccggaaagacgacgaattggtcggtagtcgtccttgacgtcatacatgatacaggtaaagtcagaagaccctgtgaccatgatctcttcgtcaaactgcaggcacaggattgatgcgctgtggtatatcgattctttctctaatggtgttgtaattgccgctatttcgtccggcgtgggccacggcggggtaatagtcataaagggggcctttcccgtggcctggaaagttggattgttcactggaccatcacggaaagttcgagccgctggtggcccaataatcttcttgcatgaccacggatagtgcgcgtcccatacacgaactgtccggtcacgggagccagtaatgattttgttcctataaacttgtcagcagtgcacggcatcaacataataacgttaacttactcgtcaaattgggaacaataaacgctgtcctcgtgaccttgaagataaatggctgcagccttgccatccttccagcgctgatcgagagcgcgccgaacaaggaacttcttcttccagtcctgattcgggattgacttccctaatccagatgacagcttcaccttggaggccgtctcacttaatggccgacggccatatgcattgcggaatacatgcctccaaacatgagaagaggatgcacgacaccaggcgcgggagacgagctctgcgtccatgagggaatcaggatccaaatatgaaaaaatgtgtgatgtaatctcagccggaagtagagccacgggatctgagaaaaaaaaagagaagttaacaaaacatgcgcgttgcccatcagagtgttcatccttaccgagtcgcgtcatggccagcaactcgctgtctgacgtatccgatcgatcgcccaagtcaatacaaataccgctctccgagtcctggggaactctcaaatcaagcattttgttctctaattccgcttttcgcgcagcctccatctgctcattttgagctgcggctgcggcacgcgccgctgcacctgcagacatgtgattcggcagaactggaggtgcctgcccacggcccgggatgggggcagggatagaggcagtgggtgcatagaaactgtgcagggcagacacactattcaaagaagggcgtctattgacgctatatccctggtgccaaagggtttttgttgaccggagatcccagctaccggaagccatgcgcttgtgattcgcatggttcgaactatggtggtagtaacggttttcatcgttatcaaccaatttagtgtcctcggtgagaggagttgtttgcttggaaggcttgcgaagactgacggacaggcgatggccgagagcgaccaaaccatccacaggatgcttcaaactcgaaaagctcttggcgccacggcgtcgcggagccacgttcgggaacgggtctatctcttccacgaccgatgtgtggtcatcctggcagatttccgtcaagcgtggctcatcccatgtgtccaaagtcatctcctttgacgtcgggatagcatgacctgcagtgcgtgggcgcgaacgaaacgacaacgaagagcgtcgctttgcggaggtggcgttggtctctcgtggcgacatgactgaggttgttggtgtgccgagggcgaattaaacaggaattggatgaatatgaacgcaatatatgacggcggatgttaagacaaagaatgtcgacgcttttgtctattttatcgggtatcgaccgatgtgatgcttggtcttggggggtttctgtgagataagtctaacaaagtatgtatatcaacgaccattcgcaaaactccaaggacccaagagaatgaaaaagagagattaatgaatgaactatacagagacaaacaataggaaaaaaagacgacgcaaggagaagataaaaagggcggaagaattccagaaagcagaacggatgggcctgggtcaggcggtgaatgaattagggagtgattggttcgaccaccgagttctcctaagagtcgctagtactgggattcaaagtatggttggctataaggattaagtaccgaataccttgagagtactcgcccctgcaaggctcagacttttttaggagtcgggaggcaaatcctggggggaaaacagccggacggaaaatgcggagtaactgtgacttggatcgccacgataaatctactgcggatccaagtaccgactacactctcacggtggcaattattaggctttcgaaggaaaatccgagacaatgatgatgacaggctctgataggccgatattggaagaacaattgacttcaatctattcagataaacacccctaaaccccctaacccccccagccctctacctcctcctggattttgtatgttgacaccgactatatacataattcttaatactaaacatcatatctcctttatccaaagatcttctcatatccggtcaaagtgaaccgatagtgaacatcacccttcttcatgcgcagcatggcctccttgagtccttcctctccaatggggatctcttccacccaacccttaagacccttatccgcagccagctgcaacatctcaagcatctcccgacggctacccaggtggctggcaccaatgagaacaccgttagagattaggttctgggccttaatgacctgaccctcctcctcaggaagaccaacactgatccagcgcccatgaacatccatcatagacagatagcgcgcaagatcgaagccctccgaggagttagcgcagttgataatcaaatcaaacgagtacaggtgatccttctcccatccctcctccgcagtagcaatgtaaccgtcagcaccgagcttgcgagcgtccgcttccttggcgcgagagcgcgaaatagcccacgtctccgcacccagcgccttggcaaacatgactccgaagtgaccgatgccacccaatccaacaattccaaccttcttgccaggcccagcaccgttgcgcaccaagggcgagtacgccgtcaaaccggcgcacagcatcggagccactttgttagtctccagtgcgtccgggatcgggaacacccagtgctcgtgtgtccgcacgtgcgatgagtatccgccctggctaacgacgccactgtcggcccacttcgaaccgtaggtgtccataggctcaacctggcagtatgtctcgttgtcgttgaggcactgcttgcacttgccgcaagagtaggactgcgcgccgactccaacgcgctcaccttccttaatcagagtgaccttgggtccgacacggattgcgcgaccgacgatttctaggatggttattagcacgagacagtagccctttttttgctttttgaatacgtaccgtgacccacgcacagagggaacttttgttcaccccatcctcctataggaatacattagtcggtatttctgcttggtattccaacgggattaccataccgctgatagtgtgcacatcacttccacatatgccacaggcctcaatcttaatgtcgacgtctatactcggttagaagcaagcataatggtaccgacagcctaactcaccatagtcgccgaaaggcttcagcttgaactattcagcgtaataaatccagataagcgtatatcctaaccagaacacagaaaagagcacatacgtagcgcttgtggaactgggtgaagctgttaggtccatcgacctggaagccctcagcttcttcggggtaaggcattgtgataagaatgagtgattggtctgaagaatagaacacggaccaaaaagtaagaaaagtaaaatagaaacaagaagacaagcggggtgagggggatgtatatctacaagcggggatcgcacaacgtgccctattcatcccacgcgggatatgctacgtattgttacaatctagctgcttctctccagtcggacaatgtcccgtggacccgctccgagaaaattgacaacggagaagattcagagtgatcggagcggaggactcggaggtggctgtcgcccgagaggccaacacgctaaacagaacggaggtggtccgggcagcgtggggtggttgttctatttagtggggtaagatccgctacgtagccgataacgttaataccaagtggtttttccacctatgagcatgccaggagaaattatatgccggtttggccttatcgataaggggtgatatagggctttggcttagggcttgggccttttacatgggtttggtctgtcaggggcaagtatgtagatctgcaagacttcttcatttggtaaagcctacattatagtttgcagaggggtgtggcactcaatcagccctagcaaagtcgacgtagacagagaatttccccaaataaagatcggatgccctcagatagccatataaatgagcctttcaaagctatactgggacagcggagctaaatgatggtttccatatagctataatttcgtgttcttagagctgagcgatactggtgcgataatggtcaagaggccacgcccaacgaagcagtgagtgcatcatatcgtagtacttcttcttgtcaatctgacccatgtaagaatccaaggtgaatgatttgacctcggtgaattctttaaaattcaagaccggggtaaattgaacctgaaatctaccatcaaagtaggcgtatagtacacgggcgcagcatctttggtcaaacactatgatcatggtctatatcgctcgcaatatatcagtatgaaattctttcggcacaaggcatggggttaggaaggacctgaacgtaccgggaaaacttcactgaatctatgaacaccctttgactcaagtgcgttgacgagcgattccaattcacggaacatgcctctcaaaccccagctaattaaggctatgagctcagcagccgaggggcgatcgtaaccgcacgaggttacatccaccagagcccatgcatgcgacttgtatgggtgatctatctccattgatcttgtgatattgattccgtgtattttgtctgggagatcgaggccgtatagtctttggaacctggataaaattgatcagcctgaataatacaaatgtcacatcccccaatatcaatgtatcactcaccagtagactgaccagtcatctgtctcgtaattgaggatatccaggtcgaaagtattcgcaatcaccatctcatgatcattatctgcctccttctcgcttttatcgtgactttcatcacttggtttgcgattctcgtcaccgctctcttcactcttgtcgccatcttgctcactctcatcatattttttgtagttcatactttccccttcttttgccttgtcactgtgtatttcctcgatatcgctttccttcctatgatccgattcgtcctttccatcgctcaccttgtcgcctccagtgctatcaaggtgccccgactcatgaacagtaggatcatcataattatcttcttcttcgcctccatccagctcgtatggccacaattccggaatgctgcagtcctgatagtccatgaaaacacgtcgaagtagatagtctgcacggtaagtccctttgccgtagttgcctttttgagatagaaaccagtcccagcttggatctgcacatatcttctctatcctaggtgtacctcttcgtggcatgaaataatgcgtaaccgaaggcgaagttatcccagaagcaatgtctagatgattgagatcaattcgcagaagctgtagattccgctgggggatggaggaggttgttactttcttcatggagacaagcatttgttcaagtctttcccatctcaggaaaaagcaccaaaattggggggttgtatttacaggggtatcgcccattttggtagtttgtccgaggcagagatgttgaacaataaggatatatggcaggatcatgaggagaaacctggtgctagtaattataataagtagattgtatgtttacctaggatcatatctagttggttgagaagaacaacttatataggattgtaagactgatttaatgtactaagccccaaccaaaagctcgtccgtttccttaaataccaggctgaactgtcccagtggacgtactccgccgtggaattaagagtaaagtatattttcatgaactatgccagtttgggaaatcagataaacttgaatgatgcagggctttgtaatgtcgaagcgcctcaggccacgataactatttgcctctacaatataagcaaccaacgttggaaaatatggcaacaaaagagatgtcatgaaacttgatatatgcattggaattattttactagactttagatgaagctccttgcgatttcccaagattatgccacatcgggcaagctcaattcaacatccatagcaggcttgatcttatcggcaacagcctggtactgggcatcagtaagacggctgagaggtcggcgagggaacccgccgtaaccgtagtatgactggatagcacccttggtaccaggaatagcagcctttgtgagaacccagtcggcagcactgagttgctgctgggcctcgatggcctctgtgagacggccctcggaccaaagagtgaagatgcggacacacaggcggggaaggacgttcgcgccaccggcaagaatggcagagccgccagagacgagggtctgcagactgaaatcggcgataccgccgaaggcaacgtatgggtgcttggcgtttggcttggagactgttgcggtacgctgggccggagccaagggggagggaggggtgatggcgccgagagcggtagcgacacgagtcagcttgccggtattggcacaggtgaacttggtgccgacgatgttagggtgttcggagatacggatgatgaggtcggagtccatgtcaatgccagcgacggcaccggggtagttgtacaggataataggaacaggggagccgtcagcaacagctgtgaagtattcgtacagagtttcatcattgccgactgcggtgcggtagtagctaggaggcacgatcagaacgtactcgccgccagactccgcaacctccttgcacaggtcgatggttccgcggatgctgttctcgctggcgccggcgatgacgggcacgttggtgaaaccagcttcatcgagagcagaccgggtctcccgattgacggtcttgcgctcttcgcggctgagatgcacagcctcaccgtttgagcccatggtgaccaggccgactaggccagccttggctagacgaacagcgtgacggcgaatagaggggatatcgagatcttcggtctgggcatcgaagaaggtcattgtcggcgcgtaaacgccggggcggagtggggtgggagacatgattctgagattattggattttggttgatgttgatgttgttgatattagagaaatgacctaactgatctacttgggacttgaggggtatatagcaatgaaaacatcattggccttcgggtcatacttctcttcccccacgtccggcaaatgccccgaggtacattgtatggtggagaatcaaattccaccaatcagcacaagcacacagaatgtgggggacaggaggggtaaaagcgacgggtaaagatggctaaagacgcacttcagccggcgttgaaaaggccattagtctagcgggtgataaatcgcttgagttcttgagtcgtacgtataatagtctatatgcgcatggaaatccctatgtcttgaaaggaaaaatgagcttgaaaagtgatcaactggcgtcaaagccatggtggatgacgatacggctattgaatttaccccagggctatttcaaatgccggaagaattatatccagcgatttaataccccggcttcctgtaaattagtttaaaatttcctcttccccttagaaattccccggaattcaatcaccatttcggaattaacagacatcatggctcctcctagcgttttgatggtacggacaatggttccccgcagtagatcctcaagctaactgagctcgcaggtcggtactggtgaatacaccaccggtttcgtcggcggtggtgcatctggctcagacaagaaggtcggtgtagtaggccttagtctatttgacctgcgtcggcggggtaaggtgggcgacttgagcatggtgggcgtgtcgggcaagaagttccctggtatccgtaagttgagcgaaagaacaagcaattaaacaggaagctaatcgcgagaataggtgaccacttgcaccgtaatatctctcaagtctacaacaacctcgatacctcgttcgcttcgttccccgcggacgaccagaccgaccccgacgcatacaagaccgccattgatgccctccccaaaggatccgccatcaccatcttcacccccgactctacccactatcctattgcgctgtacgcaattgagcgcggccaccatgtgctcatcaccaagccagcaacccagcggctagaagaccacctcgctctggtcgaggtcgcgcgcaagaatggcgtcttcgtcttcgttgagcaccacaagcgctttgaccctgcatactctgatgcgcgggctaaggcaaagactctgggtgacttcaactacttctatagttacatgagccagcctaagagccagctcgagacctttaaagcgtgggctggtcgtgattctgatatttcctactacctgaactctcaccacattgatatctgtgagagcatggttccagattacaagcctgtgcgggtctcagcaactgcatctcagggtaccgctgccgcgcttggatgtgtccccgagactgaggataccatcactctccttgtggagtggcgccgccgtgataacccggcgaagattgccactggtgtctatactgctagctggacggcacctcaaaatgcgggcgttcactcgaaccagtacttccactgtatgtgattctattttccggcagtaaacagacatcttctaacattggaacagatatggctgccaacggcgagatccgcattaaccaggccaagcgtggctatgaagtgaccagcgacgaccagggtctaattcattacaacccgtaagacccccattctcatggtaatgctgtaacatggttctatgctgactattatctagattctatatgcgctacgctcccgacgaagaaggaaacttcagtgggcagacgggatacggctacatcagcttcgagaaattcatcgatgccgtcacagctgtgaacgagggccgtgtgaccctcgaccaactggacgcccgcccgctgcccactctgcgtaatacaatcgccacaacggcaatcctcgatgcaggacgcaagtcactggatgagaggcggcctgtggagattgtctccgagggcgataagtgggaactgaagtaaagagtaaacacgatgtaaatggatttaaattataccaaccagtgtattattttggaatgaccgtatataatacatttagtgctgattctgtcatgcgcaatgtcttaccttgagtcgactaggccgcaactttaaaaatagtaagctgatggaatacgagtgcgactccaattcagccttgtacttttagaattatcatcccccctcggcgattttttgtatatatcagactaaatcattcagaatgatgcgccgaaaagaggtttataccaatatcacgcccatcccctcgtctgtgccccgccaactagccctcgacatcctacacagccatagcgaaatcatcacactaaatccactcgtcctctcacatcaacccatcagggctccacgcaatgccgtcgccgacgagtactactcgacgtggtacgagatcacagaacgagtgcaatacgtcccggggctgggcaagataggatcgggcaagatcagcttcaaaggctgtttccacaatgtcgcatggggtctacagacgcacatgtacgcgccgatgggaatcgacctccgaagcaaatggcgcattggaggcaaccagcgcgacgaaccaccggaaccgcaagacaagcgcgcagacggcgccccgcaaaccggactctatctgcgcgaggatatcgagatcgaatgcaaccgcacgctgatttctttcgtcaagggtcagttgaaggtcgcttcgaaggtgctggtagatcgcctgattaagaaagccgagcttcttgatgctggtgtcttgcaggctatgatggaggatggcaaattgacgacatataatccggccgaccgatcgagcagaattgggagggagctgtcgctttcgtcgcgaagacagtcagatcaaatgtcgaggtcctcgtcgtctcggggaccgcgatcgccgacggattcgcagttggggccgatgtctcctggatatgcctttccgccgcagtacggacaccagcacagtagaagctttgctgtggaattaccaggggattcttatcatccacaacctgcacctggtgcatatcaagagttgccggataccagtcgatatccgaaatcatcacggctggataaggcgcataatgaactatctgttatggaagaggctccagagcgtgaagatgggttactttacagcccttacaaaccaaagggttagttggttttaattttttatgtcagaagcagacacaactgctatgcattatgtattctttaagcttaatacgaacacgtccattcttcaagttgtctactgtatatcccgacatcgttcgatgagatcctgaatcctaaactattaccttcatattatcctaccgatgcgtgacaataattctatcgttcggttccagtgagtttcgacgaactgcttcgggcatgatctgtgccaatgatgcttccaatgcttccaaatttatgaacatctgatttttgaaagagaaagctagaaatccaagaaacggcgctactccgcacacaaataagaaaaaaacaaaacaagacagctcgtggtatcatgcgagaagaatcattcaaatccaattaacggcgggatccacccttgataatgccatcttcacccttgtggagcttgatacggcactgggggcagtaccatttggccgtgcgagaggggacttcggtcaggcccacgcagctgagatggaaccattcacggtcacactgcaacgaatagaatatcagcattctgctagaacatatcataatagggatagcttacatcttggttctcacagcagatcatcgtcccaaaactaacatctccacagagacagtatcggggctcattggcatcgatctgttcgaggacgccgtcttcgtctacacggacatcctgggagtcgcggatgctgaggcgcttctttccgggcttggctttgcggcgtccgtagcttactgccgcgccgccgtcttgaccagtggaaatgggacctggtgccggacgcttgcgccggcgggcagggccgggaacacttggcgcatgtgacggctcgcggatgggtggtttgtgcgcaggtgttgcgcttttgatacggcgatcgcgtccacttactgctattgcggtcgggacgctactgagagttcctccttcgattgaggcggcggctacagagcgccgcgatgagggccgggtcacgggtggtgtaggtgtggtgacaacttggacaagtgatgggttgggtccggagcctgcggggctggggagaggaggggagaacgtggcttcaagtgcgggggacgtgtgggtcttgattgggagggtgaggtcgctgttggtttcagcggctggaacggcccctctgctagatctgcgtcgagatggaccagtcctagaagaaagaacagcgacaggggcaggcggtgcgaccggggcagcaacttgcgtcggttttggaggctcgggggcaacaagttctgttgcttcagggataacctcttcgcgtttcctcttccgtgatgatcgattcgcggctgggggagcttgggcggggcttggcaaaggtttgaccgagacaccaccttcaccttccatcaatgcttgttcacgggccaactgttcgcgttttaatttctttgcttcgtttaatttcattccgcgattgctcagcttcgtctcctccaaatctttggccgcctcgccacgccgcgtttcctcaatgttatcacagtcaatgaactctccgcccgtctcttctgccagggccttcgctgcacggtatgcttcccagcctcggttcgccagggccagctcacggtgaatcattacttcactcggctgccagacagcattctttttcatcttcttccgcagcctggtcatctcccattccgtcaatcgcagccatggcaggtcctcactgcccaatttcgcatcagctggtggtggtttcaacagcgcaagggcctgtgctgttgactgtgcggtacccaggctcgggcgacgtgctttttccttctttgggggtcgcgcgggcttgggagcagatttaatgagttcgccctccaagtccgattgctcggtactggcaagcggagaatctggatcaaaggccccatcggcacctagaagacgcttcctgtttttatctctccgattgcgattgttatccaaccgcagggtgatacgcgtcgtggcatccttgatggctttcttgcctccgcgcgcacgcttcgataaaggttcgggcaacggcgacggttcctctgtggcaggtttcggcagtgcttcgagtttctggcggatgcagcctaatcggtcgaagtggcgatctacaacatcgtagaggcgacaggcctcggcatatgccgattcacgcgcatttatggcacgatcgagctgagaggatatatctttgcgcagtgcaattgcgcccggtcgggtatccgaaggaaggtctggaagctggccgtagatatgagtgagctcgtgcaccgcttgcgccgagtcgagatatcggtcatcgagcccgcggatgagggttaaggagcggattaagtctgcggggaggtattcagtgtaatcaataaagtctgtgactgtggcctgcgcgtcagggtcgaaggggccgtctaggatgacccctccgctatcgtctgtgtcgtctgtcatgggcattttctagcacgatagtagttgatgttagaatgtgtcaaattaggcgcgttctgcgatgataagtgaggacatcgaggggtctagacgtcagataacagatggagctgaatgccttactgcacgaggtcctacaacagcggatgatagttattccaatgcagctcttggtcacgtgaatatatccatagcccagatataccgatttggagcccgcatgtaacgaatatgtactcggtttttaccatagagttagtgcttcacttatccaatatagtaataacgaaattgcccttactccgagctccattaataccttcttatataaaatcgatcatgtcaaagctgagtcagtcggttttgaccaattaaaatggcctatgaagccccacctctccgaatatcgacactttaatgatacctatactccgtactaagaggtctatatggaggatagacgagggaaaagccacggaagtcaagtagtattaaagctgtttcgggttgtacaattgtaaagctctatacatctatccaaattgtatatagatgggcacctcagtgtagaatgcgctacatgtacacatagtctgttctatatagtttactgtctttattgaaagctatctcatatctatactcagccttggtctctttaatcaagagttgattcaatttcatctgacttttcaaagtcagactaaagtgctaagtgtttgctaatgtaggtaggatattgattgccaatcactaggcagtatcacctgcatgtataatattgttataacgtgacggcctgttagagaaaagagagaaaagagagaaaagaaagagaagaaagagagcaaacagagagatatagtgatctctttatgtactttactatgagctacatcgttctttcccagttgaaatcgtccctatcgtcccttcccaatccgatcgttccttcctaattaacaattctgatcccaaaggctcgccgtgcgcatcctggcgcgtttgtttatattttatattttcttatcctacttcctcctctcctcttcaccctacactcctcaatcttgccaaagcttttatctcagtcttccaaaatggatgttcgcgagcgtctgaagatgcttctcgaaggagacacgggtctcaatgacttgaatacccacttgagccaggctgaagccgtccaacctgcccccagtgcggatggagctgatccaggtgctgggtttaccaaagctaagcaagatgtaagtcaatcttaccctgagggtggccaatttcctttgtcgtacattcgtacctatgtggttggagacataggtgggtcgagagacaggccgttgacccagatcaaccagcgtcatccccgtcgtactccgaagatgcacattgatatcccgggcttgaacaagcgcaaagacgagggtggcggcggtatttctgacttggattgcgacgaggagttggtcactgcaatcccggtgaccaagtcgttcactccggccaccacaatggctcgcttccctttcaggtatatccctcagaatgatgcccagagcgtcaatgagcggttctatgagggggatcaattctggaatcgaacttgggatctgtttgtgaaatctaaaatcagttagcaaagtatcttgtcgctaatcctcacctaggtatcatctgtctgtcccaatggctatttctcaaaccccatttcttttgattcccacttcccaagctcaagcactgctcgatgaaatcaattcggctctgaacctcaatttgtctctcacgggcgttgacaaggatggcctcgtgattgacatcgacaatgagatgctcccgcagcctatgtaccttggccgaaccagcacccatgctcggaagaagaaattggagagtattgttccctcgcctctggagaactggggaccccacgcacatctggttgagccccccgttttcgaggattttgaaaagaaaatcaaacaatccatcgccacaaccaagatcaggaagagctgcaagcaggcggtccgggatgcccgaatcaagaagtggcaggagagcttgggtcgtgcgcaagcctactttgggctgtgccccccactgaagccaaatgatacacaaccgtcgtttgccaatggtcagatcagaccgatcgatgttctgaaacctgtcaattgggcctttcaagatgcccccattttcatctgtattgaccttgagtggatggaccgctatggctctctgactgaggttggaatttcgactctggacatgatggatttggaaggtgtcgtccctggtgattatggccatatgtgggtgaagaagattcgatcccgtcatctgcgtgtgaaggagcaccggcactgggttaacgtgacttacattaccggatgtcctggtagatttggatttggggagagtgagatagttcccagcgctgaaattccgaaggttgtggacgctgcgttccagcccccatacatggtttccttggagggagaagatatcccccgacacaagaacgcgaagcgcaatgtgatcttggtcggactcgatctccacggtgatatcatacatctccagaaagcgggaagccaagtttttaccagtctgaacgaaccctcttcggtcatccgtgagaccatcgacgtggcagagctgtaccgtgctgatgctgaagagaaccaaaagcggggccttcgagcactgctgggatcactgaatatcttgagtttcgacctgcacaatgccggaaatgatgcccactacaccttgcacgctcttgtgcgattgatgctgagagtcgccggggagaagccgtgggcatacgagctcaacggtgagcgcaatgttgagagcaaggatgagcgcaaggatcagcaaggcgaccccgagtctgaacccaaggctgcagtgtaacgacaacattgatggagacccgttcaccgtcaactcacgaaagtgggagtgactgaggggctggagccatgaggtcaagtttgagaatctttaaacatacctcgtgggatgctcttgagaaggtgaatgggcgcagtgaattacaacagaatgcgtgagatcaaaaatgggtgaaaataaaaaaacaaaggggatgtatggctagttctagctttctatggtctgagctgaatgaaaatctccgctgattttatgtcaaagctttctcgtgctaagtagtccataccgtataaatgtactgtatactacgaaggtgtatagtataccgtaaaaagcaaatgatataactccgatgttatgtcctactgacgacacaccatgttcatcccactatcgccccatcccacacaatcttaatctccgatctccccctccaacaaacacaaacaccgaccatctcaaccaatatatatttccccccaaaatccagaaaatgaccagtcgaggcccctttaccgcttacctgctcggaagcaaccccaatgcactcaagcgcgcaacaacccaccgcttcctcgcctccgcaggccgcggcaccctccccaagtcgcaactaagccaatggctctcccaagaccgactctacgcgcaagcctacatccggtacatagggctcctcctctcaaagatccgcctcccaacccaggacccgaaatcaccgaccacacacaccccaaccccggaacaaagcgccataaccgtactcatcgacgcgctcgtcaacatccgcaccgagctagccttcttcgagaaaaccgccaacgactacaacctcgatctaacagccatctctgccgaagagggcggctgctcgctcacctcctgcggccaaggctcggacatcaccgtctcggccggcatctgctccatcggctctggaagctgtccggggatcacgggcggcgacgaggaaggcccgccagcggacggggagggaaatgcgggcggcgagcagagcggcgcgcccggacacggcctgtgtcagagccagggagagtgccagatgccgtctggtggggggctttgtgtgcccggaccgcagttcagtgagtatgggcgcgatatcgacccttctccttcgggcggggaggggtgtgggactcttttcttctgcgcgagtcgcaccaccaggggttacattgatatgttcatgtcggcggggagtagtggggtttcgatcttggaggggatggcggtgttgtgggctacggaggtttgttatcttcggtcttggaggtttgcggcggagtgtatgcgggaggatcggaatacagattataagaaagatgcggatgggggtgcattgagggagaagtttattgggaattggtcgagtgctgagtttgaggagtttgttaatcggattggggacgtggttgatgagatggcggggcagattaagggggcggaggagttggagattatgcggggaaggtgtttggagtggtggaggcagattgtttggttggaggagaacttttggccaaatgctgctaaatgatgtagagttatctgatcaactctagatcgacttgaaatgtcactatctctagggttgtgcacatgctgtcgcggttgaaaaatattgtatgtagaatatcatacatctgacttgaatcccatgtgcacaaggctatctagaacgggatgacgagcaaaagcaaagacaaaaacaataacgccgtccacagaccgaggcaaaatcaaatcaaaactccgaaccggtctctgctctcaaaccaatgacaatgtcatcgagcagaccgtcaaaacacaagtataaaaatgacaaaatccaccaacaccattcgtaatgcgaaagcatgaagcatgaagcaagtagtaaaacacatggacacagtctggaaagtggacatgttgtacatcacagaataagacagtctgcaccaaccatcgtaggcaacatcacgtagcagccgcacgggcagcattgcctagttgtcgatggtatgagccgataggttcgaaacctctgaaaatagtattagtttctgcgtgccgaccgagtgtataaaagaaaacctacctagcaagatcaaaccccgatccattatcatcatcatcctcctcttctcgctcttcattcctcgcatgagacgtcccgttgggtcccatatcccccgaatctgactggagcgggggcagagtccgaccggagccaagtccattcgacgtcccgggtttactaggactaacgagattcggcggcgggggagagctactcgggaacccgccgataatgcggtcctcgacctcacccttcaggggactcatgtccggcggcggacgggcaggggtactcccgatatcagcgaacttccagaactgcgcgggcgagctcatgggcatgaacttcgacgggatctgcgcggtactggggggcgggagacggggctgttgccgttgcggggcgggagtaatcatcgaagagggctcttcgttgtagtaggatgaggagaggactggcggggacccggctacgttgtcggacatgccgtacgcgcgggctaggttgttgctgctattttgaacctgcgtggagatgctggagtggtgattgtgtgagcgcgacgggagcggcgagggttcatcgtagtcgcgtgggttcatatgtcgcagtgggtggtcggagccgagccctcgaccgagccgggaaccacgctctggtgtgtatgcttccaccggggctacgggaaacgagctgaagcccggggacgaaacgggtggcgactttctcgctgttgctgagaacgaggtgtcgattttgctaacgtgagtcccgcgtgctgatgacgggggctctttcgtcgccggcgaggacggggcagatgactgcgtgccgcccttgcgtgtttgcttcttccggtactcctcccgatactctactgcgatctgccacttcatacccttgcccggctcgtcggtccggcggggaaccttttgaaacgccttgtttagcgagagattgtggcggatggagttttgccagccgctttgggagtgtcgatagaacgcgtatttatccataatccaattgtagatactgttcaacgtgagcttctcctcctcactcgagaaaatagcctgagcgattagagtcgcatagctgtacggcggcttcaggtccttggaggaatccttgctgtaatcgatttcctccgtgctctccatcatcatgcctcggttgtaaagcggggactgcttagccgtgcgctggccggcggtatcgggcgatcgcggtgggggcgtcacctggcgcttgttgaacttcggagcaggcgccaacgagggcccgccggacgaagatggtcgtgtagcctcgctgttctgggaatgctgaggatgggcatgctgcgaagcatcccaggcaaccgaagccggatccggctcctgtccgctcgcaatgcgctgcgcacgctcgataaagctgggctggatattggcctcgtcgccgggcgtgacaaacatcatttgtgtattggccacctcgatgatgtcgccacatgagagaatcgcatcggtgccgcgcttcacaattgcattgttcaagcgcacaccattccggccattgacccggatgtgccaggcaggggtttcctcgccatcataaaagatctcagcatgcagtctcgacacgaatttgctagggcccaagtcgacatgaacatctggcagcgcacgagccgctattgtgacggggctagactgttccacagcccgctgttcgcggtccggttcacggccgatattgacatgcagtgttttgacgtaatacgtccaattgcggccggcaatcttagcatacgcctggatgcgctgtgtattctcggtcttggtgttggagtggtcgcgcgagacgcgcagttcctcgcggggggtgttcagatatgaaatcactagatcgacgaggtcttgattggtagcgggttcgtgttcgcccgttgagtcctcggcttcgtcggcggactcatgtttgacgtttcgaggaggggaggtacggcggtcaacctgaggatcagaagaaatctagtcttagctcctgtttgcgcgaggatctatttggtctcaaactaaacgctccgttgttctaactcaccttgcgcttcttcgcggatggccggctgggtgatgagtccggagcctctgcgtcggaggtttcttgcagttgaatttccttgcggcgcgcgcggcggcggttcgtaagcggcattatgtatagacgttcactcttcctggtctctggtatgatataatagacaaccaaagccggagtattttttccctcccgttgcgtaggcaatcaagtccgagtcgaagtactccacaaacaagcgcggggcactagagaggaaatatgatgacaaggcagaggcgagaaaaggcaaaacacagtttaaataaaaacaaaagtcttccaaggttggaatcggatttcagcgcctccagaatcggaagaccgttcagaggtagaaccagagaacgaagaacgtcggagcatagatttgccaccacggaagaaagggaaaggaaaaaaggaaaaaaaaagaagcccagatagactgtaaacaagatcaagaggctggatatctttttttttacaaaaaactcccccaatcgaaaggttgatattgtgtggctggatgttattatcgataatccctaggccgatcgacacgcgcaatggcgtctgtttgggtgaccgccttgtcgcgtaacgtgtatgacacagcagaaaaggatagaaaggagaagggaatgaagggaatgaagagagagaatataggaaagacaagagaaggaaaacaaagtgtacaagtaagaaaagaaaccgaagtgcgattggggatgtgaccgtaaacagagtggtggagtttgtggtaataacggtgtatggatacagggaaagctgccggaaaggctgagatagaactgaaataccaataccagcacgtgctcagcgtgggattgggatgcttccgagtgcagaaagtggaacttcttcatatccagatgcagagatgttctatgttgatgttctatgatgcctacataaggatgcagttggtgtagatatcctgtttctttgtctttattgttcttactatgcacatatccatgtctaacacctgtcttaacagctaatttagatttccctccctcatacatacacgaattctcagatcaataaaaatgagatctgcccgtttgcgtcatcccccggatctggcttagcttggaatgttgatttgcctctttgggtttgacatgtcgatctaaggtcacatcgctttggatcttctcaccttgaaagggtctacaggaaagagtcaagacgcaagcaacactttacgtaaataaacactttaaacagttcaaagggtttcatggagcgctacctaatattcatacaaacaggaacgacgcacgatgaaagcaccggaagagtatcagaaagaaagcggaaaatttctccgtaagaaaaaattaaagccttcaaagaacaaagaagaccaggtagaaagggggtgtagagcggaaggcaataaacaaatgtcgtcacggcgtgaaacaagctacggccaataaaggcagaaagagcggaaagatttactgaggcatcttggcgtccccatcctcgtcctcatccacaccacgtaacatgggatagaagactctctcagctgcagagttggcgtgctcttcctggggcttctcagaagcggcacgtgcactggcagtctcaactccctccatggcatcgagtccgggcggagaagccgaagagttctgcgctccatattccgcagtaaggctaccggcctcaagcaattcaaaaaccaagcgacggaggttctcaagcaggcggaccttttcgacccaggcaacgttgacatcgcgctcggcgacttcagtggccgcttgcgcagtacgtttgacatcctcctggtcgggatcagacgaggtacccgacagagcggggtcaatcaagctctccgagatgtgaatggccttgggagtgcgctcgccgtcatccttgacatcatgggagatatccatgcggtcctcggtggcagcacggtcggccggcctggcgcgttgcaaggtaccaccagtgtagcggcggcggtcgtcgtggtcatacgcgccgctcagggtagaaggcggtgcggcacctgaggcggtcgggtaaccggcggccatgctgtcggcgacggtggccgacggcaagcgggggtacatacccgggccgctctcgtgagggggcgacacgcggtgagcatggtgcatggagataggagagcggttggaggtgtatgactgtgcgctggaaggcggggtcaaagctggggtgccgaccgatggggagtgggccgaagcagccatgggggctgagctagttgcagtaacgtggcttggcgggagctgggtcgggggggagtgagtggcgcgatagttcatgccaccatgcacgtaatgcgcgccgggctgggcaatgccggcagccgccacattctcatcgctttcgtagatggtattctgcatttgttcgaggaattgatcgatgttgattaaatcgttcttagtccgaacattggacatggggggaaggtggtagcccggagcctgggaaccaccagggctgtaaccaccaccgccgccgaccgcaacagacgcaggcatttgctgatattcaggcacgggaccattgaggaagggaagctgaagggcctgcagacccaacagacgctggccgaccgcggcataggaattagggtcgaactggcggcgcttcaagtcgccaaaaaactcgttcaacgcatcgtatccacgcttacgatcataggggtggcctccctcttgtccttggctcagggcatagtacacattgccgtaggaatgcgggttgggggcctgaggtggggggtgtggctggtagtactgtgggggcggtgcgtgcgaatactgcccattgatgccgttgatagggctctcgaagtaatgggtggcagcagcataacccttagggttctgagggaacatcatatccggatgcttcatgcccggttccggagagcggatctccgagtcgtcggcatgggtcttgacatgcttcttcagatcctgaggtcgcttgaaagccttaccacagaagtcacacttgtgaggcttgagcggcacgtgaacacggatgtgggacgtgatatgatcacgcttgactgtggtcgtgttgcaagtaccccactgacaggtcaggttgagattgttggtgcttttacgtccaacatgtcgctcacaaacatgctcctatccgttattagcatctttttttttctggaattgattgatcccacttacatagagagactcagcattgggtgacttctcagtgcatccgacccactggcacggcagctgctcactggcggccgcagcagcggcggcgacggtcgctgagaccgaggcggaaggaggtgaagtggcctggatggccgcctggatggccgccggctcagtcaccggcgccggcacggctgcttgggtagaaggagaatggttctccgtcatgatgccaagaaattggattagttggcggaaatcctagaaagcaaatgagaagagaaaacagaaaaaggatccagcgactacgaggagaaagacccgatatgtatacaagaggaaagagaaaaggagagaaaacggggactccgcagaagaggaaaaggagccgagcctttgcccagaaaataccgcgttgctaagcctagcggaaagacaaggagagaaatgcgaagaccaagaccgggccaagagcctgtgcgggcctccagaaccgaggggcgttggcgccatggcttttgactggtggaccgagggggggacgaggggctgtgggtgagcattccagggctaacacgtaccaccgtagggtacagtacgggggggatggtacgtggggtacagtacggtatgtattttaataagatttgatctctggccgtctatcactggcctgtcctgtctagtaagcgaggctaaatcagttagtgcacttgctgcggagtactgaaattaaccagtgcacggcaatgttgcatagaaacatcacgttgccgagaaagaaacagagttgccggttcatattgccaagccaacgtccaagaatcatcctaataggcagtgcttcttggcagccaagtgattcctcttgccaataattcccgctccggagcaccaagactcaggtcttggactcttggagtcttggtatgaccatatccctttcgtattaactttgtctctggtgtgacgagtctgattaatctggctgcctggtgcccttgttacggccggcatgcatgagtcggtcggtttcggatttagatcaccacatctgaaggtattgccatgtaaccatatgttctggcttctatattgtctatttcctatatattctatacttctctagtctagttttctattctattctatccgtaacattggacctgacatgtcagaccccaactatacaactcaccaggatcaatcatcccgaggtcttcacaagggcctagcccaagcattccaatcctccttggagcatggcttggccattggcttggccagccgaacccgaggcaaccacgtggacgtctgagctccgcacaagtaccacaagtgctaccttactttcccgagcggtacctccgctttggctgataccaactccaaacgttcaacccaaccttcgtcccctttgtcacagggaacgcagcgtgccaagtctcagggtaccctgttccatccgaccgaaggttctcccaaaacaccgcattacccttgataggcttgaatgtgatccccatgtcattccccttctcatcccgctgctcacactccaaaaactgacaccacttctccccagccggcatcctcaaccgcgggaaattcgtccccccaccttcacagtccgcgtcgatatacaccataaacgtgctgaagcggtcccccccgcgcgccaacgacccggcccagtcatagtggtgacggtagtgcccggaggcattgtagcgctgcgcccacatgcgctcgatgtataaatccgggtgccagccctggaagcggcgggcgcggtcttccaggcagcggactgtgtcgtcgcggtcgaggagggcacggtcggagaggcgtttggtcgggtctacctgttctgttttgccgtcgtagacaattgaaggggtgtatttgttcacactgggattcaggggagggttacccggttagcttggttatattgtgtgttttgtgtgggtatccgtgttctcggggatttggttgcggttgagattggtgagttacctcatgtccaggatatggtttgcttcggtttcggagatgaagttctcgatgtatatgatcagcggttcgcgtgaaaggagatgcacgcggtactcctcggcgctggcgcagcggaatggcacgccatcttcggggctgatgaagctgtcgtcggtcaggttgatgcccggtcctggtgcgctggactcatcgaagagctcgtcgctgtcgctgggtggtgccactaggctcgggaagaatccgcgcactaccgggtccaggatgaagatatacaaggggacgaagtagagggcccaggtcaagacggtggaaagctttggaagtgaccccattgggttggctataaatagtcccggcaatatgtatgttgtaagccaagtaaatgtacaggaggtttggactgttagctctccatgcgaccggggtggagggttgcatatgccaattgatctgtctttgtacaaagatgaaggcccaagggcaatggaagaagaatatgatcaagaaagagtgttgtattgcaaggccatcttgcgaaggaaagggtttggacgttgaggtggaaatgtcgaagtatgtgggtctaggctaggctctagcccgaagttaacgatgagcaggcttcattggaaaaatagctacatatgtaggtatacggggttagggcgatcaggagtgaagtctggtgtcaggtagcctattccgtaggctgatttaggaaaagagctgtacggagtatatctggatatgtggccaagagattgagcctacaactgtcgaaatgcttatctggttcgtcattacccagataggcctagtcaaatgtgatattctatatcgccggaaatcgctacatagtccttcagagctgccgaaaaaagagtgaccaaatccgctatgtgtggagaatgtatccattagatccattatgacatacgtaggccatcatagctagttatctcagatagttttaggccacatacaccagatatgacgtcccgacgataccctcgccaacaatatacaacaggctcacgacactagaagttaaatattgcatactctcttctattgcctaaaatgatagtattttcccgattaagcgaagatctacatgattttagagtccagatctccagggaccaaggatccgagcaggggtaagtggcaaatgcatccaaagaccgaagagggccaagtcaaagtgcatggtagttctgaataccactgcaaattgaggccaattggacagcacttgagcattagcaagacctcgggaagaggatgtctagtgtctagtaaacacagacccagagatggtaggtatgtatataaacgggcaaggtggcaagaactagggatagaagttaggggaagtctcagactctgattgcctatcatattcctacctagtaaatttagtatacggttaccaatagaatgtctaataaatataaggcccagatatctcggccaaaaggagaaagtaaaacattccattcctccgtaaatattcaatcttcatcatgcattagaacttccgaccttcttggcttcggagtcattgatgattgaacaattcatgttcgagttacctatgtacttaactgtaactacgaaatacactgtcgatagaatcaaacagggctagctaccaggtataagacaccgcaatggagcccaacgagtcttatggcgcgctcgactatcgccgtcagggtcggagtcattgcagcacctggatctcaaaagcaaggtaatactagcagacatccatggccaaggccgtaaaatgtgaccgctcgaatttccctcagtcttggcccggacctatctaacagcgaggtcggcaattatcgccggcgacgggttgaatccccacatattgcccctgagaagtagaagttagcgtcgtgattttctgtcgatgaataaggagtagaatgtttgctcgggtgagccttactggttctacgctggtcccgaactgagctgctcagcgtagagggatggagcgtgattgaaacattgggataactttccatgcggatttcagggtctcaaaagacatgttgacacgaagtcagctttacaacacgtgcagcctgtaggctcgcaagtattgaaaggggaaaactgagatttgagggctggttggggaaggaacgtcgtcggataagggttgatccagtacttgatgcaactataccaaagcacatagaatgttcacttatctcgctcttactcccattgaatcaataatggaccaaacaagacacatcagggggtatagaaatccggtatacatttataattgcaaaagaaaagcgagactcctaaccccaaccaaatatcaacagttgttacaccaagattttgggcatcataatagcatatcctcgtaaaaggcacagcaaacgaatatggcaaaccagaccaaggttaaatgctgttagcattcatccactgagcccaatcctcagcagacgccccgctgcccggccgataggcagcattattgccaaacagatcatcaaaggttatccctagatccatattcatgcctatattctcatcgatgcccatgctgaaaggaggtaatccatttggagcgggcatctcttgctgttggggtgcggtttcaggtgccatgtcagttgcgatgttggcctggaaattgtagcccttccagacgaaattctggttcgggattgagaccaggtctgaactgctgctcgcatctgtcggagtctggctctgcgatattggggagtggacgcgggacgaagttcgggagtgggaggggcggaggtggcttggcactgatgacttcatccctgcggaatttgtgatggggtagttcggtatgtttttaaagtcaaaggtgggagtgccccctgcgctggagggatccactggtgtggtgggccccatgcctggggctgaatcgaaggaatactgtgacggcatacctgcagggtcgtgccggaagtgagcatcttccaaggtggacatgggctgtgttggatacgcgaatggatcgtccgatgggaacatcattggcatgagatctgggaggttggatggattggtgaattgctgagcccatgctagacttgatggctcttgattgggcatggaggaggtcatgctggaggaagaaatatgttccggggttgtcatggtttctgttagtaggtcaggcgtggttgaaatccatgtggactggtgatgaatatcagccgcagggcgattggtcacaggctggacattgtccacacttcgttgccggcgattctgatcatcggcgacagccggctgtgacatcatttgcactggaaaagtgcttgaccgaactggcagcgtcttctcgaaggatggcttcggctgaggttcggcattgttcggctcaggctcggcggtgttggatggggcggggcgcttgagattgacaggggtctttgagctctggcgatttttcaacatctcgggcaatgttttgaacaggcactgcattgtaattagtcaaggacattccaaattagatagaagaacttacgtttaagctctgagagcaccggtcggcagcaagactcttcttggccaatccggctagagtatttttgccctccatggcatctttcaggacgccatctttggctgtgggcgaatccgggttctcaagcacgaagaagatcaaagagaggatagcgaagtaggtcgtatacatggtaaaccagaaggatccattgagcagtcctctcttttgcattccggtcgtgatgtgaacaatatttcgggaaacgctgacgcaggctgccgcgcaggcatatgatcgcttgtctacgccacgcgcttgcgaaccgccggtgacgtagtggaggaatgggcggtacatgaccatctggacgtgggcgtagcttatacgcagcaattgccggacactagttatgttagctaaattagttccgagcaccactgtagactggacttaccgttctagctggggcgacacttctgtgcccggtcgcagagcagggggtaattcctccatccaattttgcagatctcgttcgatctcccggattttggagtggctgaccatgtatcgctggtctgacttcgagcgataacgagcattcttgactgggtagatatatttcaccacctttaagatgatgttggaaagacgagtgtgtgcattgcatccagccatcaacggtgtatagttagacgggggttgagtaattccttcggaagtgatgaaatcaccatcaacttccattgggtactcttgatcgatatcgtcgtcactcaggatctggggaagacccaataatgtgctcacgtagatgtccatcttccgaacgacccagaagatgcgctttcgaagctctcgttcgaggggattgaagtctgccgcaacagagcgatggagacctaatcgcagtgctgaacgaagtgcaattcccacatatgaatagcatgtgctcagcttcgcggatgattggaggaagagaaccataaagcagattgcttgtagagaaaccaagtcacggcagtcagtgatctccagtagttgtcgaccggccttgaagaattggaacctgtcaaagaaattaggcggtgccaaaatcaatacagattaaccatgacttacccttggcctattgcgccttcgtagccagccaaatccaaggtaccctgtcctgattcatcgtccgagaacaagcagccaacggcaatggcaatatataaaagcggcaagaaagagtgatcttggtttgtgaattgttccgggggagtatcgtaaatgcgctctagacttgcaaaaaaagagggtatatgcacaaatttcatcaaggagcaggcatgatcgatcgcattgtggcacaaacggcgcgcagccgcccgcggcggcaggtcatgtgtgggaggtaatgttgaatcttgaggcgactcggacacagacttcggactatccatcatatgcgcacttatcgaggggcgcgatcgagccataggcgccgtgatatccgcggcgcccagctgtttgcgcaaccggcgaacaaagagaacgcccgaggtgtgaccgtgataatcccaatggccttggtcatctcgatctaagcagcccgaattatcgaccatggtttcgagtagtccctcgtctgcgccttcttgcgccgggtcaagtgcgcctgacggtctgacatcttccgtcgcttttgatttttgcgcggctgtgaatttctgttctgtcgcatgcaggtctagttgtggatcatcgaggtcgacatttggaagaacgattcggagtagcgcttcggctttttgaaggcgattttccagggcctcgacatattgcggggcgggattccgacgacggttggaaggctggtcatatgagcaatctagaaagatttgttagggcaaatggaaaaatttcgagatataaacatatggggcgcataccataactataaacagtgcaatgagtacacggctgtttgccatcgcacttgattttcttcctacgacactcgtcgcatgcgcggccaacgcgccgtctcttctgcgccggcagtgatttggagtccatgatggtggcatcaggggtaggagtatcgtggtgatcgtcatcatgcgaatacttcaagtcggtcatgggcgcgggatcctcctcattctcgccagaaagagggctcgtcgtagtcgccatgactggatatctgaggtgcgtagaatgcacggagtcatgtaaagatgaatatggatcttggcgggcaattcaaagtgaatactatcactatatgaccaaatatcactagggcatggacggccctatattgacagttgtaagataagtagagtcacgaacgaagactgaaaattcctatgccaagtccgacaatgtcgatcgaagtctcggtggtgaaaaaaaaaagttcgctagaatttggagtagttgaagggtctgagggggactagggtcttgagggggggaaatggagatcgacgatgatgaaatgattattcccgagggcggtgtgaggaaagattatatatcccaagagtccaggatatcccaatgtatatatcttggagaaaaagaacggccaagttcccgaggtcaaaattcaagcgagttgacactatagtttagtcattcagagtcgcacgccttatgactggttggtggatatcggcggttcatatgggcgacaccgatcaaataaagttccgccgtcattttccttttttccagaattttcgctcttttccctttaatttgaggcattttcggccttttcaatgtataacaggccgaatctcccaggtcttagcccggctccactgccccattcgtctagcccccggtcaattcgccgacttccatgtatgtgttgtatatgggattgcaaagcgaacggcagcgtttgaattattaataggcgtgctggggctagttcactcatgactacctcgtatcagcctcagatgagcctgtttgagtaagatattaccggttctggcatatatcatccatcgacggagtatcccggcacagaaaagggtgatcgtctgggaactaataatacttccaaggttcctcatttctatttgtgtgattcgactatcgcgacaatagtacggagccctccgtttctattcttgttccctgcgtaacaggaattgccgttgcaaggtacaaagtacacgcctggacccttgaacgcccttgcgctgccatcacgaagggatctgccatgcaaaggggtccgttgaaacaaggcaatatgcggcaaatagcttcgacagtcctggaacgcgaaacagggggaatgcgaacctcgaaatgacctataaacgacaatctattttgaggcctccgaagttcgggtttccgataagcctcatcatagtgctccacacggagtatataacattgttcgccaagtcacctgcgtcataatcgttcagaattatcaattagcctattattaactatccacttccttttagccatcgatcctggcgatccctcgcatcgggcatggcattccatttgaaattagcccctgtggcacgtcccactttccccaaggtggatcggcatgtataacaacgccaacgcgactttctcgcgacgttcgctgcctcggccttatatggctcgtctcgtcctatgccgatttccacaggctatgggacaacgcgatacatactatgattttctacctcgtcaccttctgctgcgccttcgccgcgctgggatcattcctgttcggctatgattcgggcgtgatctcttctagtatcgagcaggaggcctttctgcgccggttcgggtctcctgctttgtctgatgccgtcgccgggggcattatttcctcgtataccggtgagacttcatcttcgttgcatcttgccgcgacccggatctaatcttagtgatcaggaggcgcaatcgtgggctcgatgctcgcgtcatatgtctcggactactatggccgccgaatggtcctcttcatcggtggtctgcttgccactctgggtgctggcctccagggaggcgcagttagtatcgccatgcttatcgccggtcgatgcatcgcgggtctggcaattgggcagatgtctgccattatccccgtttattgtgtaggttgatacacggcccagctgctaagcctcgtctgacgtgagcacagagcgaggttgccccgccacagattcgggggatgctggctagtatgcaacaatggatgcttggcttagggttcctggttgctgtgagtaatcgccgggattttgctacctagatacgatccagctgacagggtttcaagcgatgggtgggatacgggtgtactctccgaggtggagccttctcctggcgttttccactctcctttccagtcataccagcaataattctcatctgtggcatctggttccttcccgaatcgccaagatggctcatcgaaaagggtagagagggggaaggtcgctcagtcctcgcccgactccacctcaaccgaaacgcaaccaacaaccagctactcgaacacgagctcttccaaatccaagagagcctagcatccgagaagcacttcgccgtaaggtcctggcgccaccttctcctctccccacggtggcaatgccgaatcctcctagcctgcggcttgcaagtattcacccagtgctcaggcacaaacgtaatctcaaactacagcccgcgcctcttccaaacgctcggcctcacaaaatcaacatccctaatggtaatcggactctggagcgcgctggcgcagctctggaacacgctcttcatgctattcgtcgacaaagtcgggcgccggaaaatgctcatcccatcccttttcggcatgggcgcagccctatgcatcgaagccacactcgcgctgtacatcgatttcaacgaccccaacgccaacccacatgccctgcgcgctgccatcgccatgttcttcgtcttctcgttcttcttcacggctctaggcatgatctcctggatctaccagtccgaggtcttccccacgcctatccgcgcgcgcggctcgtcgatggcgaccgctgcgaactggagtgttagtcttgtcttcgcgcggtgctcgcctatcgcactgacgaatatcgggtctaattatttctactgctttgtcgcgtttaattgggcggcgatggtacttgtttgggccttttatccggagactgcgggttgttctcttgaggaggtcgaggatgttttcacggcaaagtttgttgaggagcagtcggagcgctcttttgttgacgagaagacgccggtggctattacgccgcgctcgcagattcggcgccaaggactgcatccgctgtcgatgaatcctacctatgagcatcctacttatgacactgctagtatcggtagcagtcacagtgggtctgggaatgatattgaaactaaggcggtttagattgtacgatgtaagatttatgatatgaattgatgaaatgaagtattcacgaagagaacatcttgtgttttcgatgtgatttccttggaaaataaaatcgcgctactccgtctacttcgcaataagattagaaaaggaagatttcaaggttccaccaaattgcctctttgggaataccaagacctacgtccgaaataggcaactagatccaccagcattttcagcagcttgaatgcattattgatagcaaaaattgtctcaattaagaccaaaatgactatcacaatggataaagtcaatcaccaactaggtgtagtgtttcgtctgtgagggctttgctttgatgagtttgggacttcggttcgagtgtggggtggatttggtgctgacgatcgatgcgtgtagggtcaagtcgaatgattgcactcttttgcccagaacttggatgtgctggactttgatggggggattgaggctatggatctggggtttaatggggtaggtataggatggaagatagaatagcatagggctatcggctgctttggttccatagatccgaatgttgacgcgtcagcttatgagaagagcatatgggttcaagttgcatgggcaaagcgcgtgtggaaattcagtattcaatagtctatacagtataccacttctacctctatgtggccgtctattttttgtgagtcaaatcagaccgtctaaatcacaactagcgagcagcaaatactttaacagcaagttatacaaaccccaataaaacatgtggtaaatggccaatattgcttaaataggctcgtcacgaggctcaacaaggatctcgttgacggagacatgctcaggttgcgtcagggcgtaaacaatggagttggcaacatccgaaggatcgaggatcttggctccggatggctctccgaatttcttgacggcttcagcgtccgtcgacatgcccagtaggtcagtggaggtgttgccgggctggatactcgtcacgcgcaagccagcgcctgcagtctcgaggcggagggcttggagggtggcctcgacgaagaacttgctagccgagtacacacctagaccagggaagacctttcgtccggcatcggaggagatggcgacaatatggccgcggccgcgcgagagcatgctaggcactgttgacgaaagagcgtgcaaaaggcccttgcagttgacgtcgactgtgcgctcccactcgtccgtctgcgtgtttgccatcatggtgaagtacatgacaccagcgcatgcaaccaagatatccactggtccgagctcctcacttgctgcttgaacgagagcttccacctgagtcttgcttgtgacgtcggttgatcggaggatacacttcacgccgtggacttcgaccttgcgcttggtgctctcaagagcatccaggcgtcgagcgccaagtgctacagcacaaccctgcttggctagggcggctgctaccgccgcaccgatgcctgaagaagcaccagtcaccacggcgacttgaccgctgagtggccccttcactgaaaccccgttgggtcggttgagggcattctgacgagatgggggccggggtagccatcctcgcgcaaaccagtgccgagtgtaggtctccagcaacaggctgtccaccttgggacgctcgataacggcccggaaaggcctggtcaaagcgttatcaaggaccacgatatctcggaggaactcgacagtcggcatgccactgcgaagaatatcgacggtaaacgaaccatcaccacccttggccgagcctctcttctcgaaccacaaggccacccattgatcccatgggagaggtttcgtctcataaccaagctctttaaggtcctcaaagaccgaccgagtatcgaccggcgtagggtctccgagatggaacaccgtttggtctgcctgggtcagagtggcaaggtgcacaatggatttgctgacaaagttcacaggggtcatctcggcacgccatccgtccacctctggggcgtatccaagctggatggattccacaatcaatgcagtgagcaaatcccacgcattagcggagcctgtgacactgtgaccactgatggtaccgcaccggtgaattttgactggcaatccacgctcaccagccttgagaacgagctgctctgcaacccactttgtctggccatagccatcgagtagctttttggggacatcttctatatctagtatagtagtctcgggccagcctttctcgccagatgggggcaagacaccattggtagagatatactgcacggtcgcgccacccttagcggcgagacgcagaatctctctggttccaccaacgttcgctccccgaagtgcagcgtaggggtaaacaaggttgacagtggctgcagcatgaacaattacttggacacgagccgcgatgttgtcaaattcctccggactcaggcccagtcgaggccgggaaaggtttcctggtaagatttcgagacgctccaggatagaatcgcgccagagtcccatatctaggaggttcctgcggattcgggccacacctccggcttgatcatcctgctcggggtcgctgaaacgcacaagacagatgattttagcagaggtgttctcaatcagatcattgagcaagaaagcgcccaggaaaccagtcacaccagtcagaagcaccgtctcagccgagctgattgaagtgaacgcagtattcgtgggcttaatgtcctcgtccagtgtggaatcggaaagcaagacagcgggcagatttgcttgcacttcttcagtgtggccatctctgacagcacgcacagtctccaagtggccggaaagagtagtgttctccgcaagacgaggaataggaacacggaagccgaaacgtctggaaagcttggatgacagatcagccagagacaaggaatgtccacccagatcaaagaaattatcttcggccttaatcaggctctttgagactttcagaacagcctcccagattgccgcaatgtcatggagaccgatcgggtcttttcctgtgcttttctcgctgccattgggactagagctacgaggcgaagggagatttttcatatcaaccttgccagagacctcgttagtaggcaactggtctagtgcaacccagagagctgggatcatgtattgggcaagacggttctcgaggacacgacgcgagctgggggagtggccggactcgttgatcacgaccgaagggcgatcggaggaagcctccttatcggcaacaacatatgcgaccagttgtcgttccagtccatcgccgtacgcagtgacaacgcactgactaacagccaagtattggcagatgtcactttcgacctttgccggcacaaccgaatatccgcgcagcttgatcattgcgccgacgcggccggtgatctcgaggaatccggaaggcagcttgcgggctagatcgcccgttctgtacatacgagcaccgggtgtggaatcaaaggtgtctggaaggaaagcctttgcagtggtctcgggaaggttaatgtactcgcgggccaacaaaggacctccaatgaagagttctcccgatgtgcccgtctccacctcctgtccatcctcgtttagaacgtaggtgtgtgcaggaacaatcgatgggccgactgggcagtaaatggagtcgccatcaaccatctcacggatatctccgcaggcaatctcatgcgtttcacacgcactgtagcagttaagcaagcgggcattaggaataattttgatggccttgcgggcaagatcggttgtcaccacctcaccgttcagccagatgatgcgtaaatcaggcacacgagtaccgaaccggggatagcgtgaaagaacggtagccaggagtgtgggtgtcatgagggtttcagtgaccttcttagccgagagcaggtcaaccagagctgcggggtcatagctcgtttcatcgggcacgataaccacggtagctccgcgcagtagcggccgcagcatctcccagatgaagaagacattgcaggccactcgatcgcccggttgtacgtcctgcactgcaaatctcaaatcgtatgatagtaccggggcgcggtgtggattggcgattcctttcggcttgcctgttgtgcctgacgaataggacacaaacgccaaacggtccaaatcgtcatctgcgggcaacggagaaggttccttggcgtgtccattgatctcggcaatgggtccatccaaggcaattacggggacgggcgccttgattttgtcggtctcagatttgtgggtgataatcacggcggggctagcgtcctcgataacatccgccaagaggtccgcggggtaagccaattcgagaacaaggaacgcaccacccgcacggagcgctgccagacaggcaatcacgtaatgtgcgctgcgaggtaggagcacacccacgagggtgtcccggctcactccataggtccgtaagcgactggcaagagcctcaacctcttcatccagctgggtatatgtatatgtcgtggtctcgtcttccagagcgatggcatctggggttgcctgtacctgtcgcttaaatagtgtgggcaaatccttagtgatatcgaggatggccattgtttcggaaaaggggtatacaggacaaaataaggaactaaaaaagatatgattgtaaagttgtggtcatagggaatgtcgatgtacgtcgatggtaaagagaagaacgaggaaagacgaaattttgttgagattccaagagcttcgagcaatggaacctattaaccttccagggccgtattcgcgtggggttctccgggaacgggcttcttatcgtgactccgataccgtctacttccatgtcaaccatttaggtcttcttctaattagaatattgaatatcccgttaattctgctatagtcctctttctacattcctcttcatgtaagttatatgatgtcaagcctcaacaaatatgaagaaatcacatgtgacttccaaggttggccccacttaagccatttgcatgtgaaagggcgcttttcccaacactttggttggaggcgtaataaccttggaaccttggaaccttcgaaggcgccatgggcaattggaagaatcttttttatttttagcgttggcccaaggaaattaagaaaccgccgactaaataggcgtgaacatctacagattcaggcatcaaacgcacagaccacttcaagcagatctgtactaatgcagacccttgtcaaagtatcagtctcatcttcaggcgcaaaggaaaaagctcaattgccgctgtccgatacttgaagagctctcgacaaaatacattaacagaaccgttgacttacagatatctcaatagccaaaaaaagttcacattcattgtcgctaaaaagattaaaccacgtatccacctgggcacgtgcccacttgcctacctaggaatagtggcacggccgaatggagcttcccgagattcatctggaaccaatcctgcgatattcatacataagtcatgttcatccatagatgtctagctgttgcaaaataaaacgttgcactattaatgcgtattctgatgctacgtcatctatgcagcaattgatcttgtccacggtttccattggcttgcgcatctcacgcagaatgggtgatggggtgcatgctatacttcgagggataccatggggcgaatagtgctcacgaccatcatttatgattaacacatatcctttagccctgtcacttcacaatcatctaattccatcgatagttcacggtatattataagggatagcaagggtatatacaagacaagaaaccgtgaaagagtgatacaagagggtagaaaacataaacataaacataaacatgaaaacataaaaaaaacacaagtcatctggtccaggccagtgctatacattactcaatgaatgagtgcatcgaggatcccacgacgaagacccgcgtcccagagtcgataagtacccagagaagtccgagagctcctctactgaggcagcaggagcaaagccggcggcactggtgggccgtcactgcgttcaagcagggcttggagaatggcgtcaaatgcagccattcatctcgacttcgctgtcatccacggatttctcgagcgagcaagattgctacacgcgctagggtattgcagtactcttactaatcccacatcgcggtagttgttgagtgtcattaacgctgtgaaatgggcgaccgtttgtgtttggtcatctaatgtgttgcatcgggcgcttggggtgccgcgaggatttgatggaggatggatgtttcttggactgccctgtgtcggatcatgtccaatgattgggggttgtcacatcaatatacggcaagctgctcacaggatcggagaaagtcgaataattcttcatactggatctcatccgctgggatcgcttctgagtaaggtgggaatgttggttgaggttcggggctgacttctgagaagcccgaggaggtggaatatagcggagatagcattgagcgggggcttagagtgggctggggtgctggtggtaaagtctcagatgaggctggcgcatgttggtcataatcatagaagaaggtctcatctcccggcaagatatagttctgccagttggtcatctcgcgtgcgtctcgcatgtgcacctggcttatttccttgtggcctagtcggggatcagaatcctccaaggctgcggtattcagacaggaaatgattgcatcatcggagatttcgtgagggttgtcggagcggtgctcctggagcacggagacagcaggatcgctatgaacaaggggattttgggtttcgtcttcatcacgaagaattagctgcatatactagaaagggtaatttggaatgcaacagtacctttgattatcccagacacaaaagtcggtgtataacagtcgttggccatgggtgactggtaatgggtttcataggaggaggctggcatatcgtccacataggagtcaaatattccgtgtgcacctcgctccaactctataggaagagtattgaatgtgtcgaattgcgcatcgctgatcatagtagttggcgatggcacgaactgatatgggagcatggagggtggtggccatgagaaattgttgagatgtagatcatagctcggacaactttgtggatttacatcaataaagtcgtctagtagaagaggaacatcgtgagattggacagaagatgaccgtggaggaaaccgaggcatatcattagattcaatcaacggaggatccgatgagatagaatccaaaacaaacatatcgcagttagcctcaccattgagatcttctctgcgtgtagcttgctggatcctggttgatctcctcactcggggttcgttgttcttgttgtcaccgtctgaattcgctttcttctctgaccttcgttgtgcaccccgagtcttcctgcgctccccacgttttgcttgtggtgcctcttcttcactttcactttggcgagtgccgcctttcttctggcgcatatattcttgcataacgtgacgcttcacttgggttaagttggttcgcctattcttcgaagagtcgatgaattgccaccgcccattgctggcagccttatcaagaaaggttgacatctttctggcagaagaaacgtatatgagccgtgcgtctccttgtggggcaagggagggatagcatggagaggtttgaggatataatcgctggggcgagtctaatgtccgcccttaaaagaaagagatccaagaatagaacaccgaaggaagaatggggcaactctgcaaatattgatctaacgtaaaaagaaatatacaaacgcacgatcaggataactagatacagagcattaatcgggatatgcttctccactcatcgtctttagactagactagaacggtcttccagcacattggccaacaagtgtggagatcagcattacagcgggccagggcgcaaatagccgtgtatgagctatgcacctcttggtagcttgggggtcaaagtactagaattgggaccccaactggggcgtcagggtcgataagatcccctgaaaaagctgtgacaaaaccaactttccatgttgtctcctccatattaggcaaagcttgatctaccaggtccatatttcacagcaagtaaactggctccactacccccatatgtcgaatcatcaattctgtgtgtccgggtgtctacccggcattctacccgatctgcagtctaattcccgtaagttgcctgtgagttacagattgaaggtgatcatatagttccctcgcttagagcataatcacagctgtttcgtaccttgcaatattttgtaattgtatcttgcacggcgtgatgtgtcagaacctttcttcggcggaagcattgcatgacgtttctagctgtttctaattcgttgcggtagaacctgcagagttatgcacatgaatggatatagaggacctcgttggccacgaaattaaattgcttttgtggggttaaatgggagatctctgcagaaggaaagttcggaaacttttacaatctcaacggtatctgaacctgctgatcatctcgtctatattgcattatcgaattggctatggatactagatttgccgttgcggtgatacaaagcaatcataagatcgtagaatacccatataatgactctttgtagagatacaacaagcccttctgttgactctaccccagtggagtatataaaagttggattgacgtagtacgccacaaaccacaggttctacagaatagaatgctctaaatatcgttgcagaccgaacctttgagatttaaactatgagactatccgagctctccgcccccacgttttacgcttgcgacatgccctcttgggtatccttttagtcgatcaccgaccaccggaaccaattgctatattccgaatatccgttctccaaaaaaacaattaagatacgccaatcccatgccatgggcggtaataatctataaaacactgatgggttatcaggactggttgcatatgtgggggacatcctctaggctgttagtatgctccagagtgcgcgcagtggcttcaaaaatactgtactggtcaagacagactctacctaggcgaacttgcttgagccaccattcggtgagagtttcagcgtgagataaaacttggccggcgttctccccgggaatgccttttaccggcaatgaaaggcaatagaaccctaagctatgcaaggcacaatcaccaatgatgacatttccaatctggatcctgcatagtacaaggttcagaatctcctcgtcgctttgtccaccacacgacatactctcgggcaaatgcgctgtaacccagcaataatctggcatgtcgtcgtggggatctgcgattcggcccctgtcattcatgaacacactggcttgaagtttacaatcggacgtcatcctgtaaaatagtagaaaagtccttcttgattggctgattggtggtaaaaaaatagctccctgtggattatgagagaaacgtgagggaaccacggccttctatacgttggcaaccgagacaatctacagtggcctttgccagtctttgacaaagctccataacaatgaggtctttcatagccttatagatcaagtctatatatgctcgatttccacggatttgtcgacaaaggccttgcttgttctttgttatcttatgacagatgagtatggcatggttatttaaggatctacccgctttcatttcatactcatccttcaggtttcattaatccgtatccacagggacaataatactatgatactactagtctagatcgtacatcggtcgttccgtagatttctctactttgttgccactaaagtcccacaatgtgtatccacaggttcgataatgcccagaagaaagcaaattaaggtgtgtggaaattagagtgcacattgcatagggcggaatgtgattatcttccggtcttggagtacttttcaggtacaagtaagattaacccccgctgatcgtcgaggaccactatattgtagttcgatctgaccataaagcaaggaaagccaaccccatcggtctcagacttagataatctaacggtttcgaaataggaaagagcaaacaagttacgtggcattgtataagaatcgacgcatatactccttttggtcatgatcgccttggtgcacctggacaaattcccgttgagagggcttgattgttcgctttgtcaaatactacttctatttgactaccgcacgtctctactttttatacgcatgagcatctacatgactagacccttggatagttacccctctctgcccgaaatatcagtcaccatcttcccaaccgggtgcgaccatagattctgccataatttctctcaaacctcctgacatgttgacgagcattgtaaatcgcggtttcgcttttttctcgattctgcaatgtcatctgtatcgtctcgttctctttaaaatacctctgctcttgaagattcgtcctaggtaatgttcagtgctatagaggaccgttaatgggaaacaacctctaggtatagcggacgagacacaggcaacgtcagtcatggaagaccctggtgccataaatatcgataacctggtccggtaaaagggcgtctcagaggacccatttggactgttatttgccgaagcaagcgatggaaatctacagaactacatcgaccagcatcatactagcattaatatatctctacgacttaaatggtacacacaagccgcggaggcgatccaattcatttatcagaaaggtgtgatacactctgatcttcggcctgagaattttttgctgcacactgttgccggaaacgagctcgatcttctactctgtgactttggggggtcaacaaatggagatatagatggtcggcatctccccgatgccagatttttcaatccttgccttccgccggaatcgacgataagcacggatatcttcagcctagggtccatctactatacgataatgactggccattggccctacaggtctccaggtccattcgagtctctagaggagatggagaaataccaagaattggttgacgatctatttgcctctaaaaggtacccgccggttgacggactggcggctagacctgtgatacaaagatgctggacaggagaatactccgatttgagagctctcattgaagaccagagttggcagtttgagaatgatacaatttcaatgcacccataatacatgcggttctactgagccaagacaatgctatctgagctagcgcgtcataataaatgtcctttcaatgccctttcgagatgagcctacggcctccttatcgtaaacctctctgtcaacccaagctcgaattccgatgctggtcatggagctgattgactatgggttcgtgcagccagcctcctctgtctatttgaggccattgggctggaatgcatttgctgtagttgcccgattcatgtatagctggctatacatagtactattgaacatttctgggggcttgagcgctcttaggtaccctttcaaaacaattgccaattactacacctctcagaatccagctgcagctttctggtctatatctaaagacgaaggtgaccgccgatatcagatctcgcactcttccctatatcgttaccggaatatagaagtgccacaatgacattcataatcctttttttgaagagatctctgttgaggatactagtggcaatcaaagctccaaagagatttcaaccaaagatcttactcgtcctaggaagtatccgtggaggaacagaagtgaagtgggcgtctgtcgcgtgtctgggatctgctcaccgccttcgcgctcttcgcgcccagtccgcaactccgacaatgtccaatccagacatcaaggcgctggacattgaaccaagctggaatcgagaattctatatgcccaagagaatgtttcagattgtttagttctctcaatcaccacacaagcaccctcggcgaagacattggaccagacctcatctcttcgatcggcggtggtatcgcaacccttcaaccccgtgagaattcaacagtcaacgcaagaccaccaaaagcactttcccaattgtataagtgggatcgcacagaccggaaaaatcccgaaaattcatctgcaagactctacaccctcgatacaatccacataatgtgtccgctctcagtggaactcatatcggtttagttttgcccgcgcgatcttcgctcgcatatttgaacctcgcaggagtccacaagcttcatagctcacaattacgaacgggaattagtcgggagctatcatctcgaccctccgcctaacacagctatccgctccacttgtgaaagccatggcggagatggaggcggccgtcggcgcaaaccacatgaacggctccgcgaccaaaaagtccacaaccgacccctacgaaaccaaccccgatcgcattcccagcgatgacctgtttatctccctgagtgcgcaatacggccgctacacaccccgcgccgacgatttcacccctcgctttatgaactggtatcggtctgacccgaccgtgaactctttctgggagaaggtcgcgcagaaatactgtaccccagaatactcactaaatatttcaggttcgagggaggcattcgcggctgggagtataattatccgggttgaccgcgaactggccgacggagcggcggctgcgagatactcatctgctaatgcgaatgaactgttagccgcgcagaaggcagaggactcgctcagagagatcggagttgcagtcccagtggtatatttttgcgggacgattgaagggaggaatgtgacaatcgagtcgcgcattgctggtgtctcgctggaagttgcatggaggtatctcgacacggaacagatcgaagtcttcaaaaatcagtgtcgccagatcctccaacggctcgggacaatccattccccctcagacgaaccatcctatgtatgccgtgaactcaattcgcaaattcccccctctgtcgacactcgcgaacgagatatcctatttacagacaaaaccaaggaggaagaactatctttgacacataacaacctcattccaagcaatattattgtccaggatgatcgggtggtggggattgctggctggcgacaatgcggatattttggcactgtcagagccgagaaggtccatcgactcttcagggatcttgggcctgcgtctcaaaatggcgtcgacacctccgagaatggagtgacgtggtctgacctctatgataatgcctacgaccccagtaaaggcactccgctggtcgcaaaccaagatacaccccttccgtcagtcaaaaccgagccaacaagctctaccctcgacaaattcccagctagcaacgacttggacacaaattcactaggtctagatggcacgagcgactacgcgacgtccaaaacagtggcgaatctcaagcatgggctgacgtcgagggcgtcatcatccgaccggtcctccccagcaaattccgtcaaaccagcaaacaaaaagcccacgacaaacactagcaaaaagggaactgcgaagaagccagccgccaagaagcgcaaggtaaatgacccggacgcagacagccttgatgggcggcgttcgaacacacctgtttcccgggccagcaaaacacctgccaagaaacaaaattctgtctcgatcgcagggtcacccgctcccgaagagaagaaaaagccgcagaagaagaagaaaaaagggcccaaaccacctactgcccaggagaatgacgactccgacagcttcgatgaaaacgcgatcttctgtatttgccgccgacctgataaccatacgtggatgatcgggtgtgacggcgactgtgatgactggtaccatgggaaatgcgtcaatattgatcctcgagatgcggatttgattgagcggtatatctgtaaatgcccatgagcgacggatctattacattcaaaactgactttatacactaggcccaaagtgcgcaagcgaaggaaagggatgcacaacatggaaaccgatgtgccgtctgatcgagtgccggaaaccagcgcgcgctaagacgaagcccccgagcaaatactgctgcgacgatcacggccgggaattcatgcgccaacagattcagcatcttaaaaaacgtaccggtcaggctaatggtctttttgaagatttgggtagtatgggtggcattcttacagctggggacttgaaagctgccgttatgggggtgacatccacacaagaattccgaaagctcggagatcgcatcatctccccaccaccacaggtagatgacaaagaaactgctatggctgtgatcaaaccggattcaaatccgcagaccggaagatggttgggagtcgacgtccatgccaagggcttggaatattcacccgatgagattgcgaagatcgaaaagctgcgcacgcagcgtgaggagctccttcatcgcaaggagatgcttgccgcacgcacaacgttcgtctctcttctcaaaccccgcgccaagggcgtagtagagaaactgaaacagcacgagccgaagggcggatggaaagatatctgtggctttgactcgcggctctcgtggtccgacgaagaattcgatgaatggcgactctccgacgctggaaagaaagctctcgcggagggaacagcggaagctttggctgtgagctcctcagctggcactgatgcagacggggacacggcgatgaacggcgatggcgacgatgatattgcattttggacgcgtggcgtgtgcactaagaagcggtgcgagagacacaagcagtgggtcaaagtgcagcaacaagatattctctttgaggaggaaacggcagagcgggacctcgccaagtgtgaggaggaagctcggtccgtggtggagcggggtgtgatgagacgatgggccgagaaggataatcaggcttgaatgccaaatggattttctcaagggtcttccatggccagccggatttcacaaaagcttgataccccttgacaaaaaaagcctcatggactggagttggtattttgcagattataacatagcaggatggtacctagtggctgagtttttgggccaattgcatacaaaacggcgctttgcgaggggatctgtcatgtttgagaataattttttgtaagagtatgaacaattgcatcgagatcgatcaaggtcaactttttctcacagtgatatgataaatggtttatcgttcattgctcgttccatattccccatttgcctagactcgtgccaactcgatctttgatcacttcgactatctgagctcccctcaaatcagaaaccaacaaatgggtatcgatgccttggtctgacgtcttcatgagcaaggtggggaacaaaggggggatatcagaatggaagacggagtggatgccatcttccaacggctgcctcgtagcatcatctccataggtagtagtatttccagtcgagggttgatttttatcccatcctggatacatagatcccagtccattagtattgacaagaatgatcgagagatgagaggcgtgcacacgagacaaatgcgtcaaggtgcgaagtgtagctgtcagaacggctgcacctcgagctgggttggaggctcgaattactccttcggctagagtatcgagacctgcaataatgaagacaatgggattgctggtggatgggcttgcctcggccgattttctctgtttttctctattatcttggatgtcgcgcagcgcttccgagaccttaccgatggcctgtgcggcattggggaagttttgtacaggaagtaactgcacagagtcaagtttacggattgcatcatctcttgatagaccaggctggtcatgggaagaacactgcagctcattgagtagagtcctcggggcaaaagcctcgaaacttcgtgggtggataatgaacgcgctcggctcagatgatggatggatactccgcaggtgatttgtgagaatgtatcgagggatctattgtaatacatgtattagtctcatggacaatttccgagtggtattgagtcggtcatacctctccgatatactcattgctttcgctgcttctcattcgcagcctggagaagccgaggacaaccccacaccgaaagaccccttccttggaggattggatgccctgtttccaatcatttttgaggttccagtcactttttgcggttgtctcatttgaaggaggagcttcactttccgttgactccggcggtcggagtagagaatcagcaaggaccggaaatgcgggctctgccgagtaaacatccattgtgcttgccatgattccgcgtatatacagccttgtccggttgttacagatctgatatcaggatataagtagaagaagcgaagagtgagcggtgggtggagacaaacgcgaaggtggatattccccgatgtggtctagcctcatccagcctatgagcttcctctttttgatcgactctacttgaacgttcaattcatgttgcttagatactaggaatactatgttggtcttggccatgaagtagaaattgcatatatggaaattttgatagagaacaagatgctcaaggtacattgctgtaaatatattatcaagctcgtttccatattccacgcccatcatgtacccagccaccgtctccaatgacatcgtccaaaatggctagcagatcctgccgcataggctccacatgcaggtcaccgctcctgaactctttcaaacagggcagattattcacagtatacccaaccagggagtacgaggttgcgagttccatccatggatcattagggtccatggaccctcgttgttcaagctcggtaatatgattatcctgagggggagccagctgcacatcaaggcgtcgcaggtgccgcattctcacaaccgcatccagtacaatttgcgagtgattgtaaaatggaaacacagccgtgtaggaaaagtatgtgaggccatctaagagggctggcagattggtcgggcgttgaagcgtacgagttgaatcacgtatcccacttgtgccccattctgtaagaaccgatgggacacatgaaaggaagtactcgtagtggttgtatgctttcagagaagatgactcgttaaaagtcatcgatgtccaagctcgtgatgctagaagactagtacaaggctgcaggtcaggcaggtgggatgggtcccgaggtgtgcactctcgttccaaaaccaagatctgtaggggcatatcaaatgcccagtggtgtccatcattgatcggggtagctagagtgtttccaatgaagactggcggccctattactagaacacgacaaggatccaaatagcggaggactcggcgccaccaaaatggatcgatctgatgatctgggttttcatccgcaatcgcaacaagagacttcacatattgacagaggtctgatttgaccataaacgattggaagttgggttcatcatggagcttgagtcggacgtaactgaacagtttcggtctcacaagttgagataggcgccgtgagcacagttcgaaatgcttgaggtcttttgttggagactgggtgagttgcaaactgggtgcatgatgtagttgtccgaatgatggtggctccgtggataagtaggagataatctggtctaggagctcattggggagaagttctaatggagatgccggcacagacatgccgaattgctcatgtcgaggacctcgccccacattactatgaacaattggatatccagtaccccgtactgcccaatgtaacagtataccaagagtgcactagtcgactaagatgggggtagtcgtcggctgaggggatgaaagtgaagtgccgggcttccccactccactggctccactgaactctttgtaatcggtgactcagcggatggtctttcgaatggtttttgaaaatgagagttattatagatgtgtgggctcctttagaaaggaatatcagggtgttagacaaacatatacaattaaagggactacgagtataaaaaaacttatagaagcgtgcaacctcgtggtccgtgcactataatagattcgagacatgtccgatacgcaagagtattaggatggtattagggcatgaagatagtattaggtgggtgtattagcattagaatagtcggaatgacgtggaacaatggcactgtccgattgccaaggatcccccctgtacttacagaacaattgcttcttgaaatgacccaacaaggaaatcagcatagaatctactccgtacaaacaggggaaacccacagagtcaccaaattgtggagagcctcagcgttttgctgtggggcatgtctatcatggctggatacgatgtagagcacctcacatgagatgcaatggcaatgtcatgcccctcttttgatttatccgtttcacaaacttcccttgctttcttctcatgttcattttctcagtagatctctaaagtaagatactgtagcatcttataagaacaacgctcatcgtctctcgcagttatctatatactcccttcacaatggctcctcaacttcaccagcgtcctcctttccgcgcagagcatttgggctctctcttacgtccacaccagcttctggaaaccaagctcgcgtatgaggctggcaagatccccgaatctcaactgactgcttgcgaggacaaggagattaaagctatcgttgagattcaacaagagcttggctatgccgctatgtctgatggcgagtaccgccgtcacagtaagagatccggagagccattgggtgagtgaagttgacagatatagtgttctggggtactttcttccccggtttggacggcttcgaggaggtcaacaatgtcgatgtggatgacttccgtccctatgcccccgatatcgccgcatttctagaggccggccacaagcccggtgagagcgtcatttgtaccggcgagatcaagcacgtcggtagtacctatgtcgaccaattcaagtacctcgctagccaggtccctgccaacgaggtcggaaacctaaagatcactcttgccgcgcctaactggtaccacttgcgctaccgcgagggcaaggcttatcccaagtctgtatacaccaacgacgaggattactttggcgacatcgccaaggcctaccaagccgagcttcagatcctgtatgaggccggttgccgtaatgtccaattcgatgaccccaacctagcttgtaagatgtacctacccatccagccaatatcgattgacgaaactaaccttccaccaagacttctgctccgataagttcctcactggcttcaaggaagaccctttgaatgtgtactccgccgataccatgttcgagaagtatatcaagcagtacaatgactgcttcacaaacctgcccgccgacatgcacgtcggtgttcacctatgccgcggtaactttgtcggcagccgccacttctccgagggtggctacgaccgtatcgccatcaagctcttccaagaactgaacgtccacacctactacctcgagtacgacaccccccgcgccggtggtttcgagccgctcaagttcctgcccactcacaagaacatcattctgggtgttgtcactagcaagttcgccaagctggaggataaggaggatatgaagaagcgagtcatcgatgctgctaagttcatcgctgagggtaacaacatctccctcgatgctgcgcttaaccaggtcggtgttagcccgcagtgtggttttgcttcccatcgtgagggcaatgccatcgactgggatggtatgatcaacaagctgcagctggtccgggatattgcgaacgatatctggcccaaccaggcttgaacttggtttttaagagtaaacaataaaatcacttttctgtccgtttttagttctaaattctgcacggagctttttaacataccttggatgaatgttttaaatagttgtctgaacgagcatttgctatctttattcttgaatatggttaacgcttttttgaagtccgattctctgtcctcgtctcattgtaacacaagaagcaacaacggtctctgtctgcttacatgaagcgcgaggagcagcactagcttttgatgccccccgatctcacacaggctgcatcagggaccttgccacttcaagcttttgaggcataacaatcttctccttaaccagtctagcgatcacacgcacagtccacccctggcaattctccgtaacagatttccgattctccgcttggggaggaagctcctcctccgcagcctgtttcaccagcttggctactctggcctggtcttccgacacaacagccagggtgtagatgttggcagtgaagccagcgtcaacgacattgatcttatcagtcgacgggtcgtacttcatatcctgtgcatcccccgtgacttggtacacatatccgtagtccggctcgttttcgtcggcaaggaagagtgcccaatggttgggctctccgggggcttgttcttcttggacgagatagagatagagatggggattttcggccggtggcttcaactcctcggggttggaagtgtcctcagtccaatcctgcgcaccccgcttcctaaagaatgtgcggccgtcgacctcgcacacttctctgagaccccttgtcttgatgggagtccccggcggaggaaagacgctcgtctaggcgaatggggtattaatatcctgtttcctatgggtatgagccgttttattgatacctgctgtaaaatctgccgcatagtgtcgatttggtcgaagttcattttgctggttttgcgaaagtagtggtcagtgtagtgtggtagttacccaggtagatatcgtcagatgacgaaaccaatcaaacacaacaaatatgcagggatcattgcctttaaacacgagtcattcaggcaccgttgaagaatatcattgattcaatcagtctcagagctatttccttgcacaacagccccaaggaactcttcttccgagtccagtgattcttggtatacagtcatcattttttcttttcccttgccttctattggctcttttgggtctgctgtatgtcttgaattaagctcttcaaccaatttttcgagaccctctcctataccccttagattttgcaggtcctcaaacaccatagtctcttttgcttctttctcccatttatccagctcacttcttttgatgcgtatttctttgagttgcacgagcaacctaccttctaggagatctttgctgcgtttgagctcttcgattgttgatcggatttctcttcggagtagcataactttctcagatcggagtgaatcattcagagcttcgagaaagatctgagcattttcggcaagtcgctcaatgccagctgcagtctttcgaagtctgtggacggccgagtgcctcagctcccgaaggaggctgatgacctcatctaatggcctcgtcaaattttccttcagccgtgtggaatgccgacaaaataacttggtccattgggtaagctctacagcctctgtacagtcccagccgtgttctttcaagatttggggaaagtcctgctgagcgaactcgaagcaaccttcctccaaaagtctttgaatggctgtcaggacaacatgttgaccacggtagtgtatgtacactgggtagagcgatggaactgcaggagttctgtccgaatttaggctcgcaggatgtactgggttgggtcagcgctcgatgcagaggaactcacgacaatcaaagctcaccttcagtctccacgtctgtttcccgttgatgagtagcccgagggacaattgcatcttctcctgtcgtctctctctgggaaattttttgaactgtgtttgcctcatctctcgctgcttccgcctccgaagcttccctttcggcgctttgagtaggcgaaacatcgaacaactctgggaagcgaattttggcttccagtgtagagtcaaacacccgattctccaagagcttcttggcaacgttgctggttcggtcgacgttgtactcccgcagaatatctgccaatgcggttttgttctgttctatcaatcctttgactgtcttcaattttcgcacctgagagttcgagtcacgaaagatatgctggcatgcgaggtaaaccaacctctcatcagggtcatttcctgccatgacgtagcagaagcttgttgtgtcctaaatatttgcctaagtgccaattagcgaatatttataaacagtagtttgctggaatttctgtgatgtagacgcaagcagcgtctccaatcagtggaatacacctgaaattgtaaccttggaggcaccttcgcctcttcaaccagtgttataatgagactgtctgctatgctttttgggaggtcttttcacttgatctcagggctgtcttaacattgttcttccgtgtttggaactccaggaatgcttagttggacacaatacccgcaaccaaccgtttatcttcagcatcttggcctacgcaccgagaccgatcgcaggatcacggtgcattatataaccgtcgaatttttgattgctttcatcattatttttataaatctcaagaatgacaatgcacatattccaagcaaatagaccgaagctagtttacattgtatacttgcatggtgcttcatgaagaacgtatcggctagactagctagtactagtaatttcagtgaaacttctcagaagagaatcccactgaatgtcatcaatggggaatatgccgtccaagtcgccatatatcgacggccaaactgtaggtgccatagcaacatcattgggaggaacttcccccatagacacatccggccttgcatcctgagatagcgcattttcaatgatatttctgacttggtggggataaattcgagcaagctgccgcattttattgcagagactgcccacaacatctgtctctttttctgcagtagacatgccctcaaacctcacatccaacgtgttggcaagctctgtgacaagactggggtaatctgccatatcgataacagcctgggcttgggattcggtggaagagtcaataggaccagtaatgagattgagcagggtaaatactaaagtgggaatgtagcccactccaatacataaacgagcacttgtcgatattgtcatttgactgatttctgatattcgcaaatttctgatcgtgtgaatgagctctttgctccgttgaatcatattcattaacatggtgatgcggactgcgtgggtagattccatagtccacagttcttctcgaagacatagttcctcaaggcgtacctcaatgtacttgagttctgtgcgtattgcattctctgcagagatcggttaatcccagccaatcatataacttcaaataaggtccctgacatacccgttgacgaaggaatcccggcgaggtctttctccacggatgctttcaagttattgaactgttgcagcagacagccatgcatgacctgggcttgtactgttccaccgcttggctgtatcgaagcatggacgtcatccaatgttgccaaaaatgattgtatgtgaatgaacggtgcgatccatcgatctgaaatttgctcggttgatgataaattccgagtgcacctatcgatttgaatatctcggctcatgctagttagccgaccgagacttccatggaggctgagatgcagttagttagagctgcatctaccagtgcagacagtctcacctagaagacagccaatatgtgccaagtaatgcccgctgctcatctagagttaaatttgtctttttgtgtagccccaaatcctgtgaaatagaaacaacaaattgaatcaacagcagaagccgcgggtgatgtttctccccaggatatgagtaccatgcgctgtgaacaagcagaccacggagtaattcgaggtttctctcagatcgtgccacgattctcatggtgacatgcttcataatttcatccgcgacaatcttgcgaagaggggacgcactgccgatagtggcagctacaatgcacaaaaagaggaaaggctgtgtacgcctcagactttcagccgtctcaccgcgtccaagcagaacaaaaggaaatttaggaataaagtcaagctggaaactcgaaactaagcgctcagcctcggcttcgctcaaaataccccgatcaacgatagtcggctggccctccatcgcagaggtagtaggcggatcgggaccgtgtgacggatcttgagcagcagcatgcagcgcgtcgatgtctaccgaatccaagtccgggtcatgactagaggccgagtcgtgggtgggcgggttgagagtatcggacggggtcatcacggtgcgttgggtcaaggtagccagctgtgacatcagttggtcgaccttcttctccagtacatccacacggctgcatccgttattaataaaactagcgctttttgttttgggacgaatcaccttggtgcaaccttgtgctttcgcttcgtctgcgggaggtcaaggtacgtgcatgccttgcccaaacgagcgcaccgttggcacaggtcagcagcctgcggtgtacatttcgccttagcggccgtgcaggccacacaggctcttcttttgacagggactgtggcgctcatgatgtcgctgcgggaaacggagcggccgatcaagatgtataagccgattgctgagcaatcggagggggaaacgggaggaccggagcgtccggtcggcgccgatttgtaataatccatagattcaccgaagtatataacacgagtcaatgtcgaatatcgaaatagaatcatcagcatagcaacttattccaagtaatcactggatatagttcaatcaattcaataaaaaatggcctcatacgcaatcaccggagcctccaagggcattggcctcgaatacgtgcgtcaactcgccgccaacaaagacaacacagtcctggctattgtgcgcaatcccgagtcgcaaggaatttctgagcttgccaccagacatcccaatgtccatgctattaagggcgacgtcacagacccaaagtccattctcgatgccgcttcggccgcagctgccatcacaggcgggaagcttgatgttctcatccacaactcgaacgccgttgatatggctgccatgggcctcaatccgtcccaaattcccttcgatgctgaagccactcggaagatttttgagccatcgcttagcacaggggtttatggaggtctatgggcgaccaatgccttccttcccctgatcgagaagggcacccagaagaagattgtacatatctccagcgccatggcggacttggatctcatcatcaagtcaggagtcagctacgctgtcgcgtactccgtctcgaaagctggaatgaatgtgcaagttgccaagtacgcagcggagcttgcgcctaaaggaatcaaggtgcttgctttgagccctggatgggttgatacgtgggaaggcggtaaggagtcatatatgccactgcattagagataaaatctaacagccttgcaacagagaaaccggccgaattaattcaagcgcttgccggtatgctgtcgcagtttcaggcagtggagccaggactcacggggcaaatccagcccgaggaaagtgttcgaaagggtcttcaagtaattgagaagctggatgctgaatctagcggcttgttcttgagtcagaatggaaaccagacaaactggttctgagcactgatgagctgtatcagtggatgtacagtcatattcgaaatcagttttatctccaccctcttgtgacttgattcccgaaccctaactccagacacgctgatctacattctgtcgatccccaattccaagaatagagattttattttacatgacgcgggtgggaccccatgtacggagtatattacaagacagaaatccaaccaagatatacaggtggtctaaacctcgatgtagcaaattgatgctacaatggcttatactggaattctggaaacctctagacaaagcaattcagctcaatttagtatgctaagtcaatatacatctcccaccggcatggaaagacatcggtttactccgccggtccctcgatgtttctctcctttatggaggaggtcttgtgggtgtgcaagttctctatcgtatagcgtgtctcctcatctgacgaactgcggccccccaggatttcacgaacgagtccgacgctcatgctggttctggattgcgggcctattggactttgttagacagtggttcatttggacatgcatataaagggtgcatcataccgccgaccggcttgtaattgaccttgtctccttctttgaaatgaggcattgctgttggttgcaggcgtgtggaattggatattccgagaacatgtattgggttgtacaaatttgcgtgaacaggtagagtcttccgtatttgcagacagaaagagtgcaacagtcaaccgaaactgtcattatatttatattggctcatgatggggaaaggagttccgctatcgtcatattgaggtaactggagaaacgagctgactgggttggaattgatggctatatgaacatctagatccattgcggaggtaggctccgtggaaacgacagcacccgaatctgataacgcacttcaatcagaagtatgtcatttgtttataattttttaggaccaatgccagaacttgtctatcttgtctccgctgtagccaatcatgtgcataagggagcgcatccacaaaagggtatacaaacaataagaacgctagatgaagagcaaaatgaattaaagtattaaattggacccaacaagcccatataagaacagaggggatatcatagaagtgaagataaacaatggtaaacgcaacgagataacgaggccaacaaaagaaaaacaaaaacaaaaagcccaaatgctgcatggtcttgtcatcagaacacggacatgaagagaaaagagaaaacacttgagaatgcgagatgttgtacatcgaagctgctctatgagcgcctctcgaaatcacagcagtgtatcttatttctggggctgggtcttgacattgtttgagagccaggcctagtaagaaatagcatggttagattgacgtttccaaagagataggtcagcgatacgacttacaagaccctcgaaaatacctgttccatctgttgcaacactgggcgcaacgtaccacaacttgtccttgagcttagtcaattgaagctgctgagtaacttcctccgggcttaagtctaggggtgggtcagcggacatattcatcggattccagagacaggagatacgcacggccaggaacatcttgcttgttggcgaataccagaagcagagcatccttcatttcacggtcgttgataatcttgtgcagttccgagcgagcctcctccacgcgtgctgtatcgctggagtcaaccacgaagatcaatccttgtgtaccggaatagtagtgtctccagagcggtcggatcttgtcctgaccaccgacatcccaaacgttgaacttgacgttcttataggtcacgctctcgacgttgaatccgacggtaggaatagtagtcacgtcctggttgctgagtttaagtttgtatagaattgctgaagaaatgttagccaatcgtgtccggggtctctatctaaggaggaatcgtactagtttttccagcagcatccaagcccaacatgagaatacgcatttccttggtaccgaagatctttcccatcatcttagagacttgtccacccatttttgcgggatttgacgcggtgtcgggcgtgctcaggagctgtttggcggaatatcaacaattgcgacccgccttgtgtattgcgggtttcgaatagagattgaaaggcaccggacgtttccgtgcaaagtggcttcgattgagatgacttcgtcaacgaaaggacaggaaaaggagaaaagtaggtgtgttggtgcgtgaagaccttcaatccaatttccctgaggcgggggaacctagaaaaggggcttgggctgagcttactcatcatctcctctccacgaggtccacgggggcagtttcatcctctcggctttggtttcatgtatatcaaatcattctcgaacttgtttcattcatgattatacccattccatggacaatatattcagatatctatcaaaacacttcgatgtcattaaatcgtaagaaccgtggttgtgatcttcctcatccacggcggtattactccgacagtatatatatcttccctttccttcatcaagcactaattgcgaacaaatgtcatttgatcaggatataatgccaattctaacaatcaaaggccttcttaagcgcctatttaacctaatcaacacgcacctccgccatatatagcagcatgcatctgatatcggagcctctaggtatatactggcctatctccccaacaaatacattggcggtttggccgagtggtctaaggggattgactagaagttctagaaatcaaatctgttcgtcggcgcatgcagctgtctttgtttctttttctttagctttctcgagatagaatcggaactaacggtttcctaaatatagtgcagcatgtcacctcgcttataagatacttcgtactcgatgacaattacacttctactatttatgtacacatccgagtattctataaggtaaccatggataggtttgaaatagttcgagaaggtgaattggcgttacgtcatgattaaatgaagtcattcgtcaacttcatggacatggctgatagctacttctttgattatttcttggataaattcagttgcttagaatttctaagaatcatgcccggcgaaggacaatcgttcgaacgccatgcctcagtcacacagcagcgtcgactcgcgctacagtacaagcgtaacgcttggttagggccaccgtcggatgtatgaatgtctccgaagtagcagtaaaagccacttctcgaaattctcaatactaataggaatactaggctatctacgccggtatctctagcaactttcatgattaccatacgtcaactatagcgatcgcaatccgcgataccacatatttactagacttcctccagaagcagttctcacccgatcaagcctctacagaggaggccaccgacttcatcatttccgagctgaaggcatattctatgaatcatctggagaaaattattgggatagcaatgcctgaacatgttgcaaatcactgcattcgactgtgccctcgcctttgggcggagctcgacatcattcccttggtcttgtcgaacgcaacactaatagacagagtcaacatcggacaggttagcgagacccgagacccgggatctaatggatggagtgagaagacgatcgacgagcaggctgaatccatggcgcgaaaaggtgttaggttagttggtcccgctcaatgccataaaggagccattgggtctaagtgcgcgcaggctatttggaccggacaacatgcccctgctacaagtgggcttcttcgggcttgtggaagtagacacagcctaccatgtgcaaatggcggatctgagcgattttcagaaaaccgtctcggatagaacttggtccgcgatgcagcactatgccaatgaattgaaagaacgcaataccaaagtggcatttttcagctccacgcctcagggtggtggtgtggctttgatgcggcatgctctcttgcgattttcacattgtctgggtaccaacattaaatggtgtgtctgtgccggtatctgtgtcttgaaatatgaagcctaactcaattattgtaggtacgtcccgaaaccacgcccgggcgtcttccgagtgaccaaaacaaaccacaatatcctgcaaggtgtcgccgatcaagatgaccgcttaacaccagagaacaagaaactcctgacggagtggattgaggagaataccaggcgatactggacccgaccaggcggacctttactttcaccagcagagggcggcgcagatgtcgtaatcgtcgacgatccccagatgccaggcatcattcccatcgcaaagagactagctccaaatcgaccagttatatttcgaagccacattcaaattcgaagtgacctggttgcaatatctggctctccacaggcagaggcctgggaatacctgtgggatagtattaaacaagcagactgttttatcagtcaccctgtgagcgcattcgtgccacggaatgtgcccccagagatagtaggctatatgcctgcatcaactgactggtaagggccgaagtccgataatctgcttgcatctgtcatctcactgaccgggacataggctggacgggctgaacaaaaccatgcgcgactgggacatcgcgtactatggccgcatcttcaatacaggctgtcacaactcggatatgccaactatccaatggcccgagggttagtacctgaaccagaactagttatgatgatcacattccacggtgaaagctaacacgaggatagactcatatatcgtccagatcgcgcggttcgacccgtcaaaaggcatcgtggatgtgttagtttcgtacgagaaattttacaacaaactagtagccgaagcgcctgatatgcaccctcccaaactagtgatttgtggagaccgctcagtagatgatcccgacggagggcggatctacgacgatgtagtcgactacctggacaaaagagtcccagatatccgccatctgatctgcgcgatgcgggtgcggccctgcgaccgaatcctgaacgccattctctccaaggcgactatcgcactgcaactatctacatccgaaggtttcgaggtaaaagtctccgaggcaatccacaaaggcaaaccagtaatcgccacgcgtgccggcggcatcccgttgcaggtgacgcacgggaagaatgggttcttggttgatgttggcgataccgatgctgtggcgcagcgcttgtttgagctctggacaaatcacgatctgtatacccgcatgtcggaatacggcatgcaaaatgtaagtgatgaagtgagtaccgtgggaaatgctctcgcctggctctatctctcttccaagttgccgtatggacctgttctgcccaatggacgttggatcgaggatatggcgtttgaagagattggtctccctaacaagaacgacgatttgcggctcaaacgcgcagtccaggtggagaatatgggttagttgtacttttttgtttgactctccttcattagcagttgccagtatgtatatacagacaaaatccgaccatctaccacggggatacttaattagtacacagatcgatacatcaaaacacaacattgaaagtagcatgggggtatcataaaaccagaaaaagaaaccaaaacaaacccaccaacccctcaaggccgtccaacaacccgatacctctccctagccatacctccctccgccccctcaacaccatatccctccccaacctccccgacaatcctcgccggtctcccaccaacaatacaccaactcggcaccaccattccaggcgggacaaccgcgccatcgagcacataagcatagtccttaataatagccatactgcctatagcagcacccttcccaacatgaacatgattcccgagcgacgcagcctccacaaccgcgccctcgccgacaaaaacatgatcgccgatcttgagcgggtagaacgagtatatgccgcggtgtagccggctcggcgggcgcaggatcgcgctcttggagatgtagctgtatcgcccgaccgttatcgctacgctgggcgtgctcgggctcgaggctgctggcgcggaagggttgtttggatcggtgggagggggaagtgttgtcgtgcggaataggtcgccgcggattacggcttcggcttggattaccgttttgccgcccaggatgatatgttgcgtcccgtggatttgagaccgtcgggagatcttgtttcctgtgtcctgattttctcggcgggttaggtaggggttcttttgttgtggggtcggttgggtggtttcaattgggagggtaagttagggggatcacttacggtctcgatgtattcgccctttgctgcctttggtggagccattttgaggaggattgaagagctttctgtcgtgggatgctgcaattgtggagttggagttgcaacaaatatagctcgaccccaggaatctagaagatgcggcagtatagccccaaggcggtgtatgtaaacaactatgacgatttcgatagaccgattgcaatgaatttcttagctattgttaagttgcactcagatgggaaaaactggaattaatgagatattcatgaaatatacactacgctgctgtcattaaagcttcaacaacctccggatatcctgtcaaccaaacagttcgtcgaaaataaaacagtcaataaaaaaaaggcatacaatcatagccaacccaaagtaaattacccccacatggcatgtccgcaattttatatacgatgcttcaactgacaaacccaaaagaaacctctcaggaagatgtagtcttcttcttctgctccaaaggaccatcccagtgcagcttaagcgacatggggaaggcactgtaagcacttccgtcaccgcggaggtaaaaggagtagccaccttcctggggaaccttcttaatctggccctgggcaccggcagcacggcggagaccctgcagacgaccgacgacacgcagcatagcaacgagcgcgattttggtgatctgctcgccgaaatcggtggtaggaccctgaccgtggttgagatatgagccaagagggcggtcaaggttgacctggttgggctcggggaatacgctggggtcgtggttggcttcgtcgaaggaggcgaatacttgctgcccgggctggatggtgtaagttttgccgtggtccacgacggtcacactttgcttggcctcgcgcaaggcgccaaaggtgccgttcaggcgaatagcctccagacagtagcggtacagcttctcgtccgattcggcagaatcggcgttggcgaagcggttgatctcagctaggtgggccttgttctcgggcgcggtgtagaactcgatgatctgggtaaagacctgaccctggctgggaactagaccgacgatcgtcgggacgattgcagaccaggtgatttcggaagcgctggagccggcttccttcatgcggcggatagcttctgttccgaactcgcggatggcgttgtcatgcggacggaagctgttcatgatgccagagaagagaccgctgttggtgtcggccttgacggtcgcctcaacgacctggccaagctgggtagagacggcggaggcggctcggttcagagagcaagagcgaggagcgtcgacgtcgaagaagagcgcggagaagatggtggcaaggatcatgtgcatctcgtgttcggtgaataaaccctgcggattctgctcggtcttcaggggaatgccgaagagagtagatgcaaagtgaacgtgggccaggttgccgacatcgcgagtgatatcgatctggttgatcttgcccagctggccactcttttcagaaatcaaacgctcggtgatatcttcgtagaaggttttgacgagcttaggaaactcctcggtgttgaaagccttgccgatagcctcgcgttgcttcgtatcgagctcgcccttgccgaagaggtcagacatggagcgggcccagctgggacggaaatctacctgattcgagatcaacagactggcactttcgtgagaggtcaggttgacacgaggctcagtgaaggcgggtttgtcccaggagtaatcctgctcacggcctagatccttcatgattttgcggttttcgctggggattgtcatggggtagtgggcataaatggagtctggcttgtagtgattagggaaggcgcgcgtggccagcttatagaagatacatccctggttgatgttgaggtcgtagcggcactcgttgtaaccccagttggttaggttacgggggttgtaatcaatagtgtagtgacggtcaccgcggacaagggcgacggcatccgacagcacagcacgggagatggtgtaggtcggggcgatgccgacaccagggatcatgggctccttggcctcctcggtgacgataccggggtatagttcaatgtaatcggggtggtcgtagagatgacggagagtattagcgatctcggggttggagttgacttcttcgaaagtctcgtaagccttcaagccgaagtgcttacggaactcgttgagagaaccgacgttccatctacgcgaagcctcgataccgaggatctcgatagagcgcatggccttgggtacgtttcggggaccgaaagagctggccacatcctcggtggcatgggtcagaatatttacaagctctccatcatcgaaatatccattttcgtcacgcttcagacgggcgaaggtacgcttggcgggatcagcatcgagcagaccctcaaccttcttcatacccatcagtagctcaggcatggtgacctgctcggcaggcttgcccagaaggtcgtagtaaatctgctcaatccacttctcgtcaccctggctaatggccgagtgccaacggtaggccaaattgaactcgacagagcactggttgccgagaccggaaggagtggaaccggccttctcggcctgggcacgaggatccaagcaccaggtggagttggtgcggttcaggttgacaatggtgcgcaggtaatcatacagagtgatgttgatgtacagaccgcaagtgataagacggccggtctggaacaggtcctcatcacgcttggcccaggctttcttggtgtcctcctcggacagaccaggacggggcttgctgaagcgaccattctcgttaatctcagccagctgggtaacgacatggttgtggaaacgattcagcataaccagcaaaacaccacaggcagcaggaagggcctgcagacgaccttcagagaagcaatcgggcttcaactttccgtcctggcgggagcggatcagatcctgctgctcctggatatcaccatacaaaatggacaagtcaaggtaggcagaggtcttgtttatgtgctgctggcggtagtcggtctggaagatatctatgtacgaaaacagcatattagcgcctgaattatagatttcagtggggtcgacttaccgtgaataatcaaagaggcccagtcgaagaaaacactggagaccttgttagggtgcggagtgaactcctggcgagcaaagagggtatcaaaaatcagaccggcgtcgggcaatccgctgggctggatggtcaggggagaaatggtgcggcagtatgcagtattagcagctcccagccacgggagagtagggttgttgttggagccatcggccgagcgatactggtactcgtctcccatgtaactattcacagcattagcgcgcaattgcaacacagcagtctccaaattggggatttctcacgagagaggtgggtgaggaagtgagttccatagctcatccaggaacacactggtgagctcggtgcggtttttggagttaccgggcaaatccgcgaccatctggattatgcgctccatcaagtaggtcttgtcatcaacaagttcgccggaggctttgctcaaaatcaggtctttgacagtgttggcatcgcggaatcccagtgccttgatgtcattgaacagaccggacgacttgtcatgcttcatgtatgcgccatcactggtttggttgggcagaggctcctgcgaagcgtgaattgcttgcgcatatttctcaaatacagcaacgacctctgcacgcttcacgatgtggttgtcctccttagtagaggtggacttcgggactggcaagaccttagaggcacgcctgctgctcttgtctatgctcttgggctcgatgtcattgcaatccttgcaatccttggcttccttggattctttggagtctttagagtccttggaccgcctgaattgggtagagattctcctcaacattgtgaaaaaggaccacaaggacaagttgtgagaataaagaaaatcaaaagagagatacaaggttgctaccaagggccagataagggggaataaatcagaagctcgacggtgctctttaaaacgagctgttcaggcgacgcaagtcagctgcaggactgtggagcgtctgaaatgtggcggatttgctatcgtcaatagctgattgactgcgacagcatttgatttgatggagagcaataggacgatctcttctcgggcctagtctctgtaacaaatattccagccccgcatggtgcaagctcaattcccaattaaagtctctatagtggactctcgatgatgaggtatctcaatatagtaactgatcatcatttatgacttggtacacgaaaaaggggacatctgctcgaggtagtatgtacagaatacgcgaacaccctgcccaggtggaatcatatgattgaatatcagatataatagccatggttgcggtatgcagggcataacccggagagctgaaaggcaaatccaaatgtagatctatattgcacgcttcggaagagcggataatcgaccaatgactgtgagtgctgtaataccggactataatcagcggtgtacatcatctgtacgaggtactcctctgccacacagaagtgcagacggatctcaagatcgaaataaatcgacaccaagtggggaagattttccgcgaaaaagaaattccaatgtacttggtggctggctgtctatttcagaacttgctccaattagggttatgtgtgtaggatacatccatacttcgtaggcgtgacgcaaggtccctatggtaatgtgatagagcagcagagatgtccttggaaaaaagcaaaagaaagaaacctttcttttttctttttttcggttttcgcttgtttcgatcgtcgctggcccacctgttcatccacttactatggattttaagtgacgaacgggccgccagccagtcatcgtcgcgaattattcagaatccgatccatctcggggcatccacttcatccactttcagggtcttagttcttgtttactccgtaccccgtgtcgctcccactgtcctcgtggcgcttttcctaggtagaacgggagtttccacgcgagaatgagagaatcagagatgactccttttgaaaaagcaaagatggtcaagataggagtgatatttcaatatcatagttcgacgaaccacggaccattgcatggggccgctcccggataaccaatccatggatggataatctatgcataaatgctttagattagctaccgatttacaatgattcctctattcgcttcccttttttgggggatacgaagagaaggctggaagtcccactcttcttcccttcccttttaggtattgacaatcctttcggctgggaacagttccacgtgaaaatgacaaggttctgagtttccatattgtcagtaatcccagattcccagattgtattaggtcattataatcacaatgacacctcgagaaactttctctagtctgactttgccgaggaaaaaaattgacggttcaccagtgggtcgcggccctaggccgtgaaggaacatgaaccaatacgtatcgatcgatacgatgctatggcaagctagcgccaaagctagatccgatcgctcaagaccgaaccgatgcgccggaactctctcaataggaacgccccctctcaccccttacgcctcctgaatcaatgttgtaatattagtgaccgagtttgtgtggagaatgatcgacaataatgtcccgagcaccacctagcatcatctcctttcaaaccctcatagggccaatgattagtactgtactccgtagcaaaaagtaagatctgcacgtctcgctttggtctctcttcagctccatctcatgggaattccaaatacatacactaggtgaccaggtccgcgccgcgcaacttgcatccctcgtgcagatttttttcgagtcaagctcaggcctgtttgcaacaaactcgcatatccagcaattactgccggcacatctccattgggtaggatgcacccccgctacgacgaagtagggtttcgtgtaacctgcacctgcgggcaagtcagcgattgttgacaggaaataattccaaaaagcaagaggcccgcccatgtttgtgatgggaatgtgccaagtctgggggcccgcccgtcaaccaggtttggcttatttttcacaaactgcagcgatcggctagtgggttgtacattgttatcctgcaaaccccccttctcttagatccgatgtagggcgctgattcgtgcaatgatcctagctgtacggagtacccagctgcataagagagtcatcctaaccttgagccttccccctttctcgtatattgcctccttcagctctgactaggtgtgcctggagtcttgaaccttttttttgtctgaccgacggaatcgcgcgatcatggctgatgggtatgaaactcaaggcccgccgggcataccgaagcagtttgtgctttgctttgatggtaccggaaacaaattcgccggtgacgagtcggatagcaatgtgctcaagatctttcgcgtaagtgggaccgcgagccaagcgtgtggaccatgctaagaagtcgcagatgcttgaccgcagcaaaagccaccagtatcattactaccagccgggcattggcacatatgtgacttcgaagtcactgactagccatggccgaatccaacgtatcaagtccgcctatcaaaaggccaaggactcagcggtcggatcttcctttgacgaacatgtcatgggtgggtacaagttcctgatgcgatactattcccctggcgatgatatcttcttcatcggctttagtcgtggttcatacatcgcgcgatttctggcagagatgctggactatatcggtctactcgaagcaggaaacgaggagctggtccgctttgcatggaagacattcgcaaagtggcagcagcggtccaatgactcggaagaagagcgcgaagagaagaagaagctcttcacatacatgaaggccttccgtgagacgttcagtcggcctatctcgcgtatccgtttcatgggtctattcgacactgtcaacagtgtgccgcgcttcgagtccgcgtggatgcaacgtaccaagttcccctacacggcacgcagctcagccaaggtgattcgccatgccgtaggtattgacgagcgccgcgcgaagttccgccaggatttgatctctggggcgcgtccaaaggagaagaagaaacaccgccgccaccatttgcaaatgcctaagaaccatctgcacctcttccaccaggataacaaagagaagccccacgaggaggtcccagacaccgttcctgccattcgggtcaatgacaaacccgaggaggaacaacaggaagaagagaatgccgaggctgaactcaatgcatccagatatgggcccagcactggagaaacatactaccatgccgggcaccatgcctcgcacacaggctcgcagcaaacctcccgcgccgggagcgaaaacgggacaacgcagcccgacacataccgcgcacgctctccccgacgcaggctcgtagtgcccaaagcgtcaacggacgatctccgctcattgcgaagcaaagagtcctttcacagtttgcactccaacaccctctcggtgcaaattcccgttctcgaggtcgattccagcgacgacgaagacgaccaagacatccacgaggtctggttccccggctgccacgcagacatcggcggcggatggacactctcgagcggcgagtcatgggcactgagtcacgcgccgctcgtgtggatgacgcaagaagcgcaaaaggccggactcgagcttgatgagcgcaagatgaaacaattccaatgtctggaagagttcgacgatgattatagctccatccgggaagagattaattcccagcggccgggccggtgcgttgcgcctgatactgataacgatgatgctttccgctctatgcccgatgataaggagcgcagtgttgcgagtcgcgacttctggcatgcgctgtataccgccagtacgaagggtctgatgcatgactgcctgatgttcaaccagggtattcctaccatgtcggttatcacgtggcgcattatggaatggttaccgttccgtcgtatggatctgcagcctgatggatcgtggaagccgattagctggccattgcctcgtggtgaggtgcgggatgttccactgaatgctgagatacacgtttctgctatccggcgtatgcaggcggatcccaaataccgtcctggtaatgtgattgtcggtggtggtggtcgtggtatacgtgttgcaccggaggagtatggtattggtgagtgggtggtgttcaaacatgaaggggatttggtgcgggagacttacgtccgcaagaacatctccaagtgcaaggagggctaggaatagactaattctggttcttccttggttcatattatatatccctttctatagtgtctaataggtaatttggagaaattgtatcaaatgctatgtgtctattcagcatatcccctctgcctggccctatacactatcggctcatacactcgtaaatagtcgcggcatatctactttggtggcaattctatagctaatgattatccttctagatatcatcaaggagaaactcttcatctcaaaagacccaaaaagaccctagaacacctactccgtatagttgtcaaacatgtgaatatgtggatatgtggatagagccggcgagggactgccatattgtgttagctatgaaatgaatcaaagaagcccgatagttaagctagaagagcaatgaggttcaagaaagcagcaaattctggactcaatacatcatcgtagagagagaggtgatgcgcaatcacaacttcggcctccccgctcatcatccctttcgaccttctgttcagaaggacaccctcatcgccagttgaatcaaacataggaagcaaccaggcagtttctggagcaatcgcagatgatatttggtgcgatcaggattttcagtgaaaatgaagttccgcttgggccatgggctcctcttatgcggtcaaccttcgtctttttcccttctcacctctttgaccttatcatattatttctcagcctccttcgtttttgcttctggcaggtccaagagtctcctcctttactctatgccatgatgcgaaggtaatactcacttacctcccctctttccctccgccccccctttttcttctttttttacacatggagacacctggagagatgcgccctcgcaaacctgggaccaacaccggggtcatccccgttgtccccgaggataaggaggacgtcatgattactttttcgctgtctgaaccatcggcatcacctcggacacgatcccctttggcccgatcgcatctccgctctcgatcactggcgggaatcccgggcatgccgtctatgacgcgcgcttattcttccccagggccggactcccagggtcgttatatcttcatcaatggccgcggggcaccagtcgatgcgaaaagatctcccctgcaaatgcgccctgacgattacagcgaccgcatgggcgccctcaacatctccgaaaccatctccgagaacgcagaattagaaaccaatcccaaatcgtcttcacagccagcctcatctcccgtcctgatgccgcagacttttccccgtatcaatcgcctgcgtccgacttcaccccttcctttccagactcccatcagcccctccttacattccccacccattctgggctctaaatacaatgagtcttaccccagccaccccgggtctgtttcgtccatctccgtcccctcaactccgaccagcctgcgctcccgaagccccagcatttcgtcactagaaacaatccccgacatccccgacgctgagaatgaggcccttgaagaggatcggatcgcggagctgaaagccgcagctgatgcggcggacgcggcaagtactgccaaccgacggcgcggggcatccgatgcacccagttcattcactacaatgcgggggggatcgggcggatatgcaactcggagcgagaagcgcaagcgatggagtgtctgtggtgccgagcgacggcaggatctcgacctagagaccatttgggaggattgaagggtgtttcccagtctcaaacgagtccaaccgacctgcgcgccttgtctactacgaccaagtactacctgcgctcccacattgtttcatagtggagttgatctccacaacttcttatctttgctttactcggtggcgctttgctccgttctctgactttccttgatacccttacattacctccaactcgtacctttcatttgcagtcctgtttaccatttcaaaaagcgcgttcgtcatggagttctacggcagtggcggtggtacgtacgatgtacccgcttttagcggcttagcatgttcgactcggcccatccattgttttattatgctggtcataactccgtccttttctgtttttgcggtgccttcatttcctggcatctgtgatgtgatgtcttcattgcttcaatacaattgagccttttccagaataatctatcctgttccgagtaaatccattgtaaccactacgatgtagctggcattgataaggacatccaggtgttgataacgggaactaatcatccgagcacccaatgacatgcaaagaatcttcacttgatcgtcaaaccttcatattcaccgacctcatttccaggtgcatcagccgcatatcctaagttgcttccggaatggctccgagtccgcacatcggcatcatcggcgcagggatttcaggcctccggtgcgccgacatcctcatccaaaatggagcccaagtaacaatcctagaagcaagagatcgcattggtggcagagtatgtcttccttatacccggcacaactgcaagaggccaagtagttctttaactttcttatcggctaggtgcaccaatcaacagttggagaccatatcgtggatatgtatgtacacgtacatgactatgacttggaaagtatgcagctaatgctcaaatcagaggccccaattggattcatggcgcgggggagaaccccatcatgaccatagcggaagaaacggggtctgtcatgtatgatcccgaaggtggagcgcatatctcctactcgcgagacggccaccctatcaacgacgaagtgagcgctaaagtccaggactttgtatggaccactatagcagaagccttcaaatacagcaatcaccatggagaaagcatccccgtcgagcaaagtctattcgatttcttctgcgatcgagtccagcaaaccaaattctcagatgaagagaaacagctttgtctcgatgcctgtaggctttggggtgcatatgtcggtgatcaagtcgacaggcagagcttgaaatttttccgtctggaggaatgcgtggacgggagtatgtacctttagcaaaatagcccggagacgtatagcagagtttctaacatcatcaaggcaacttcatcgtggcatctacatacaagcgcattctagagcacatcgccgaaaccgccactgcaaaagccgacatccgcctcaatgaacctgtcacaagcatcaaagcaccacctcacaacaaccaatcaccaacaaagcaccgagtaaccgtaacaacagccacaggaacaaactacaacttcgacgacgtagtcataacctgcccactgggctggctcaagcaaaacacctcagcattcacaccggctctcccgccccgtctcgaacaagcaatcaacaacatctcatacggccgactggaaaaagtctacgtgacattcccgcgtgccttctggcacacccaaaacaccagcacctcaacaactcaaacgcaaactcagaataccgtcttcgcccaattcctcgaaccatcctactacacccaccacccagcacacatagaatggaaccaagaatgcgtctcgctcgcctcgttcccagaaccacacgcccatcccacccttctcttctacacgtacggcgacagcggcgcagagatagtaaaccgcatttcggagcaagcgccctcgtcgcccgaatacagggaatctctaatcgacgtaatgcagcccttttactcccggctccccgggtacagcgcggagaacccggattgtgtgcccgtggcgcttcttgctacgcaatggcagaaggatgtctttgctgggaatgggtcgtattgtaatttccaggttggggttgaggaggcagatgtggatgttgaggttcttaggtctggggatgggattggtccggttaggggtctttggtttgctggggagcatacggcgccgtttgttgcgcttgggactaccactggtgcgttctggagtggggagagggttgcgagattggtttgtcaggggcttgggattggggaggttggtgggatgggggttaaggatgattctttgccttctgctggggatgtgtcttgatcagaaggaagggttgtatggaaactgatacatgaggaattgataaatatttagacattggtattatgacagatggttcttgtttgaagaactatatcctgggaacaatggtgatagagagataccgtacgtgtctaaaaaccgcgaggtgtgtcgattatacaatggactcagcaagttgaacattttcattcatacttaaataatatatttcagttcgttggattcgttcaaggattagtatctttctcgggagcttttcacatttgttcagtgaagcccccatcaatagcaggccaggaggaccaaccaagtccaccgagtaaaacaccatagaggaaagataaagaaccatgtagatccatatgcataagaaatgcagggaaagaaaaagagaacagggcccgaataaaagtatataatggacagggttcacgtgacagtggcaaaagaccgcctgcaagcacatcatgaacacagcaaggagaagtacagggctccgaacaaaggaaaatgagtatcacaaaggaaatgaaaaataaacggataggcaatggcgcttcagaatgtcaatgtatcaatcatgcatcccttcaaggtcatcgccaggccccctggctcagcgacaggagaccctgcacacagtccaggtcatcttcttgactatccccggtgccaccagccatgaaagccgatacttctgcactgagttctggcggggctttgccctgtgagccggcctggagtgcccgattgcgtttgccgttggccgagatgccgagaccgcgattacggttagcatcacggaggaccggtcgtgggatgtgtgaagtgttgcggcgacgaatatttgtcgatcgtgttcctggaacccagttctccttgtcagagtcaccgaggtcttgctccagatccggtttgccagacttggaaaatagaggcttcgagagcttggatgggttcacgttcgctttgtttcggcctgtttctaatcgccccagagatgaaacagcgcgggcgagttttcgcctcttctctcccatggactgagagattggcgtatttggctcgccgtgagcagcgaggctgtgccgccctgaggcactccgaggtaatgagcgctggctgcgagattggaaaagacccggagaaccgttcggcccgctggtcggtgttgatagggcacttcttgcgtccgtgtcacagaaagattcccagttacgtggatcgcgagagcgaccgaaagcacgatctttctcggtcacacctgcccgcggcgtggctgggaagacggcactgctgctacgttgcaggcttgtcatctttgttcggcgaactgagaacatcgccacacggttcttagacggtgatggttcgttctctccgcggattactgcctttccatccgatgacatcgcgatacgtaaggcgttgcggcccttgggcggagacggcgttagctcgtcctctttgtgtaccaaagcctctccatcaaacgacatcgacaaacgcagcgatgggggtgacttggtaggtgtggtttgtgtgttttgtgtgttttgtgtgggttttgtggttgctgcctgctcattttctccctcgcctcggatatccgacactgaacgtttcctcttcggtatctgcagaagagggtcttctgagggatcattcaccagttgggaaaactcttcctgtgtggtgggcggagtttctccagcagcctctgttgccacgcttgtctgagtgctctggggcagctcatgttcatctttatcttcagtcactgggtccgaatcgtctgaaaactgcaacagtcccccgtgccatggttttgatgccatttcctcgcggtggtcgttgatgtcaaattgctctgccccacttgaagatcccggctccgtcgacgcgttatcatcactcgaaggttgacctgatgaatcgaccctacccgagcgcggggcgagtaattcgtgaggttggaggggtttggatttccgacggtcgttctggcggcgattttggaaccaaatctgtgagccagttagaagttgtttttgtgtgtgaactcttggcatcacatacttggacctctttctcgccgagtgagacgcggctcacgatactcgtgcgggctgccttgtctggtttgggattttgctggtattcggattcaaggattgcgtgatcctccggactgcaaaatagttcacaatcgggttaattgacgcgttcatagtatggacagttatgatagcgtacctagttcgacgtcgcttctggcgggctagcagtttattgtcgacacgaggagggaggttctgtgtgagggttttttgcgaatgaacgagaaaagcgtagttaagaggattggagtcggtggccgggagagagggcgaagatgagatcgccaccgaaggctccgggtcagacatgatacctaagagagcatggaggggttgggaggataaagagaaagaagcaagaacacccaatcacccaatcacccgatcaaataaataaaaaacgaggcactgaagatggaaaagccgtgaggctggtatgcagaaaaaggtatcaaatcgcgtcgcggtgtggacgcggagtagaaagaacgtggcccgcgctagtagcaaagtgctcctccgaggtacttggtacttggagacacggatctctccctgattcgatttgatcctgatcctttcaagtctaaatttcctatctctctgactcctcggaatgttcaatttgcattttgtctacatttgacgcgttgggctgtagtggtttaggcccacacttggactaaactatacagtctgtgtgaagcgcaaagcgtgtcctcgcgtttgatacaggcatatttgaaatcctccagagtgctccgattaaacaaccgagggttaaaccattccattggccttgattgccttatttgccttctttcgcctgatctgcccgtgagcgcccaacgcgtggtaacgcgccctcacgtgaccccacgaggaagacttgcacgtggtggaatgtgatctctccgatgattttgggaaacgtggaatgtcaatatgtttggaatatgtttagaaaagagatcccatctcttgtgttcgtagatgcacgacgagagggcatttatggctcccaattgtaacacccttagtgcatagtgggtcaccggtgaggtccccatctaagaaaagcaaagagcttcaaatgttggtctacagccaatagcctaatagcctgcttagcaggagttgccgactggaattctcggatctgagtgtaagccagtttggggacaatcacttcttctatggcattggtcgtgtttttcttatatattcggtctcctagttaactatgttgtacaacatacaagattgactaagtatagaccgcttcaaccaccaattcgccatccaattaggagcattcctatgtctgatcggcatgcaatcttatgaatagtcggagcccctaaatagtcacatcaggctgcacccgatatatgctggctatgtcatcggtctgttgtccatgtcccactctaataagccgagtgtgcagaccaagaccagaagtgttgatttgctcattggttgacgcacgctaagcaagccaagggaagaagcgagaataccgcgtatgcatgacatcaactagaaatgcaactgctagacagggagagagtatatatttgaatgtgcaggtctgctaataagcacatacattaaagctaaacgaatgcgacttctgagaaactctattgcttcgaccaaagcctagtatacaagtacatgtttcacatagctatctgaccatgtaaggtactctttttatatgtccttctcactggtcatcttgtgttcactatataccatcacagccatacgatgcctatctagtagaccagtatatccctttcgctctgtcatcatctaatcatggggactttctcactaacttggcaatcgacgtacggactgggctgtaactactgtctagtgtttattgaccttacattctgctcgctcatagtatccatgattctaattaggttagatctagacccgaatagtcccggggtaaaataaagtaggagtctagaataccagaaaagagtcaatactccagctagaatcttcgaagaatgtgtccatcacattaatacaacccttgcaatgataaagtagggagtaggacagtagaggctagtcgtcttggctgtaaatcagtgttactagcattattcccagaccaatctcgaaagaatagcataccaatattaggcaaataccaagtaataagaaggcatctggttatattccaagtatctcgatgaaccccatgatcaccaaaaggacaatccagccgatcaacattccgcccccgggctatcccttccatctcccagtgttgattggttcgatacaaagctgctcaatgcctaaataagacaatcaggccaagaggaaaacaaccgcccatcgtacgataatccacgtcttttccccgctttgacgcttggacatgggatagcatccccagatcaatgcatcttccctgtcattactgcaactcttactttggcctcttttttggattttgaggtccttttctacctctggactcatttcttcgtatcctgactggtgtcggctctttgtttctttttctttaagaaatatagtgctataacaccatcagactctctggcccggcacggcgaccgggctgtgacacccacttttagcttgtgatcactggcacttcggaaccaaagctttttgaatccaatcttctatttcgcttccgaccttggtcactatcacacccatctcatcgacccgactctgaccgttcgtgcaacaaagaatcttgaactcggagagatggctgaagacgcgaaactgaagaagaaccatatggcgatagtcttgggcatcggacttggagtggtgctgcttatcgcacttagtttgatgtgagttagattcgatttttgcatcttagtgtatgctatctcttgtgtctcctccgtcctttccccattctcaccgatacatttcctccgtcggttgtgacttgttacataaaccatgccactccattccacgctaaccgtgtcattcagtctgacaatactcatcaaccgccgggacaggcagtcattcttgagatcaaggaaaaatcctactgagcggttgcgcaagttggacaaggtctcgccaacttgtaccctcgagaagtggtgggcgaccacgaaggggaatctcggactgtccgaggccgtcgatggacagttcgtttggtatgtctaccttgctttgccggtagaacagtcgctgacattctgttcagcgccgtttgtttggagcaggtagaccgcacgcaggagatccgcgacctgcggtgcttgcacgtttttcaccgggaatgcctggagaagtggttcttgggtgaccatttcaattgcccgctgtgtcatcgcgcatactatgtggcagacacacctccccgcacagattatctgtggatggtatgaccagataccagccaatgattggaagggagggagaatacaataacgatgtgatgaataaatctttgcctctaaatcatctccacaataattcaatgaccaaggtttatggcgcaaggccctcggtaaggggcatataatccggattgaagtcccagatcgtattgtagtttgaccaattgaggaagttgtcgaggccggttgtcacatcgtccaccacatgctgctgcacaggctctggatcgagtagctgatcaaggatgcgagacagctttttctcggcttgtttgcaggtatgatagttgccgtgaccagggcctgcgacccacgataggaaagaaataaacacgctgaggttgcggatcagctcagcacgtgggagaggaacagcgtgtggaccggactcatgcgattggcgcaggagttcaaggagaaggacgctggcggaagggacaccgtacgtgaggacctgaatttattagtagatgtctatgaatggcaaaaatggatgacatacgatccaagaaaaatgccggtctagatcgaccattggggttcggaacgaattaatctgaatgacaatagctagcacccgacgagatacatcgcaaagatccgcctgtccggtgtttgtgtttttgacgactgcacgatagagtaagaatgaagtgtatagataatccaaatagaaatagacaatggtaagccacccatcatggaaatggtcgttcgatcgccggtcatatcgaagctgatccggagatgactgccatatggcgcgagatttctcttggatttctctgtcataaagtcagcactaggaaaacacgtaaattggaaaagacatactcggatttctgaattaaatcatgttgctcgcgagtccccagtacaacctcaagagtttcctcccgaatgatagctagctgatagcgtaggcgagttggggttactaggtgtaacctcccttgactgttccatccggcgctgtttagctccgaaatagcattgctgaggacatctccgcctgcaaccaggacttcgtcgcttagatccaatggagcatcgagtgtgcagaatcgaccattcatcagtggcggccgcccaacaaatgttgctatcatcttgtccatgcagaaggaagcaacgaagcagcgcctccgccactggcgaagaaagaatgggcaattctcaatgcaattagtctctaagtgtagcccagctgcataaatcgtggataccaggtcacctaatcgacgccatgcttgatagcctaacagcggtcagtaaatcgataggacatgagatcctacagaaaggtaaagccttactggaatcaccatattgttgtgttcgcaacatagcatcattgaattgcaacattgccagcaattcgtttgcagacgatgtctggtcacagaaaccaaggcataccgtacttatcacagtcacctgctctagtaaccggtctttcgctcgaggctcatccgagccccgcgtaatgtcagggtcattgtctggcgtaatggccaattgcattccgcaaagagcgaagatagacccgagtgcctcccagcggaggttgcgaccggtaaaagaggaacagtactcctcgactgacatagacttgtgagtccgcatcgggcgggaggtattttgaaatatttgattcgccaaatcttgtagttgtgccgtcggatcactggagaacccgtcaaatatatcgcgcactgaacgcagaagttcgtctattacgatcttaggcacgacggtgttgttccatgtccgaccatagaaccgagcaatcagcatatcacacacagtgagattatacaaaaaccgcagtacatcaaccccggattgaagtcgatcgggttccactatcaaccccgcagaggaatctgtgctctcttcgggctcgaacgaaatctcactgcgatgctcagtcaaaaccgcagagtagcttgtcgatcccagatatccaggaagagctgcgggtggctccaatggcgtgaagaagcgcccattacccagtgagcccgagcctgggctagaagcactgtttctacatattagtatgggcctatcatccgttgcaggagatgcttactttgaagttggttgactggtcagtcgactagaaactatcgcaggattgactgaatcggaaggtctccgtctagtcatcggggctggatgataaaagcatttgtcgctgattctttttgcggtgcatcggcgacaaaccggccggtcatggtcacatcgctgtttggatctccgacagggttcacacgactgcaaggtgccgtttttgcgcgttgcgggcgatgcagagcgccgatcgtcgtttctcatggctcgagaaacaacgcatagaggtatatatgatcgatgaaagaaagacctcgggaaatatgatacccgcgatgtttgcctcgtccaaattaggtttagcgtgccacatctaggaggtcaaagtataagaaacgagaaggtcagtacaattcaatatggaagcttgcagatatatatatttttattggggctgcatgtttcgcggagggttatattaatcactggaactggaacccttcttggcacgatataggaccttcactgacggcctgcaagttccttcctcaaaaaatcgtctattatctatatgtcccaaggctttctgttttcctcgttcgtagactggagatgataagttacttgactgagacgtcgaactgtacaatcagacttatcctaactttcacttgagcccattatgcttcaaagctataaatgagtattggaagtagaaaagtcgaagagtttcaatattaagacttgctgaagattcataagctgaagtaactacctatgagttatctagataaaatctaaccaatctaaccaatctaatccccggtcaaccacttatgcagcgtggaggtaaatcttcttgtttcgatataagacatgagtcaacaatagccccaatctcggaattgtcggcaggccaatttccgctcaagagttgaaaatactcgaagtacatgtttattctgctttcggcacatgctgctcagccccatctgttgacaacggcttagtttccttctctagctccgagcccacagatgattgaacgtcatctgtggctagctggtggtcgagccgagctttttcctcatctgtggcgccggtgaggtcaaaagcaacctcctcgccgaaatttttggcgatttcctctagggtgagaccagcagtctcggggaagaagaagtagatgactgcagtttttgttagcgaaattttagttgacgggtcgatttgatattattgggaacacataccgggaatgaagaatgcagaccagcaaataatgacaagataatatttccagccgacattcccgaagcccatgggggcagtttgcaggaggatgagggtggctaagtatgtcagttagaatttggaggcgaaattgtaacgaaatacttaccagcaaattgaccgaagagagaaaagcccatgccaattggtcggatttcagtcgggaagatctcggagacatagagatacatggtggtatcacagaaagtactgcaggaatgtcagctcgatatattcagcggacttgatatgttgaagtttgactcacccctggaaggccagataaaggtacatgaagaatataccaaatccatttccgaccttgtttgttgtaccagcatactgggcggtcatagcagccagacaggatgtagatacgataatgccgacaaagccagtcatgtacatgccgcgccgggagttaattttatcatggagccaggcgcccagaggattgtagatgacacctgaactaggttagctaacggtgtacacagtagaccctggatgtttatgctcaccagctgttgtcagccagacagcactcaagagcaggggcatgccaccctccatgcccaagtttttgtatagaagaacagcgtaattgttctggccgttgtcagtcggatatacttctctgtcggatattaccacacttacgatgatcagaggcccgccaaattcagcgccccattgggcaaggaaaccgatagccattcgctttcggtatgttttccttgtaaagacagctttccacacgctgccgtaagtagctaatctctcagcctcgagtcggatttgctcttttgtctggaagaactcttccttggcagccaagttattcgggtcatctggtgattcacggagccgttcgagaacatgctgcgcctcatcgagcttacccttcgaaatcaaccaacgaggtgaacgggggagccaaggagatcccagaagcagcaccaacgcgggcagacattgcaaggcgagagggaatctccagccaaacccagacagggggcctgttgcatagtagcaggcataccccacccatcccgaaagcatgtatccgaagaccaagaaaatggcgtggtggccgacaagccagccacggcgcagagcactcgacatctcggaaagatacatagggcagacggttacgaggataccgattccaagaccacaaatgaagcgaccagcttggaacatactaaatcttgtcagcgccagtctaaccctcgagcaggagaagcgacatacgctagtgaattcgagccggcttgaagtgctcctccaaatagagaaaagaaggcaccgaactggatgtttgcctttcggccaaagaaatcacacgaccacattataaaaagtgtaccaacagcaccaccagcactgaaaacaccatttgctgtcgagatcgcgggggtagtgattgtcgcgtatcccggttcaccctcggcgggcaggctaaagtaggcataccatcccggctggccgattgtactggagataatcgaagagcaatatccatatgtctatttgtgtcagtttagtgaatagcagagacttgaacatatctgcgagctcaccattgacccaacagccacaaaaacaataaccagcctgttataggaactggtctgagacccgaacctacccatgatagaatgttgtagtccttacaaatttcaaagaatcaagggtgtataatgaaggatatcagcatcaggtttgaatggggagaaatttcagcatgtttgtagccgacaataagtaggggggccccgttggggtgctctgtgtatggcccaccgagagttgcataaagttcgcaagaaatacaagtggcttgccgatcacggcacaaagacttttgagcctagaccctgaaattgcgtatggtcaacataccaagttaagcaacgctcgtttgtcgagtgaagttcgtttccagcatgctataccaagtacagagtacgatgtacatacatacaccctgtgagagtagtatgttgtacagaatactccgcgggggtccaattgcggagccattagagtgcggatcccgttccgaggctattgagaccttacatctccacaacggaggtgctccgtacgatgtcagggaaaagatccttgcggtccgtgctagtgtcatgcacgaagttccatttagaaaaagaacacgacatcccgggctctataaagtatactttttgttcccaactttgaatcgcagaaaccacaatagaacagcagaacagcagaacaatggcccgatctccatttgacaccccgtttgatcaactcccgaatccaaagcaggtttggctaggaaagccaggtagctatgaagagggtctagggaaattagccatccttacccctgaagtcgtcgccgcggcttccgctagcgagataagatgtggtcgacgcgtcacaatgggatgggaaatgacgaagttggattatcctaatctcaaccgtcagccatgtcaccatcagattgtgcctcttctgggaggtgtggcattcgatgacatctatactatgaacccacgtgagttgagagtgattctgcttttctcccttcattatattgactgtttgacagagcaaagtagccagtgggacggtctgcgccatttttcccagacagtacctggtcagtctgaacgtctattctacggtggaacgactagtgaggaaatcaatgatcgccaaaatgatcgaattggtcttcagcattgggctaaagagggtattgcaggtacgcatccccttcacatgaatacacgactcccctgatatgaactcacacaattgcaataggacgtggagtcttgatcgactacgccacatgggccgagaaaaaggggattaagtacaccacattctcgacccaccaagtgcgctttgccgatatccttgaaattgccaaggagaataagatcacgtttcaaaggggtgatattctgttcgtccgtgtaggagtgaccaaggagtgggacacgtccatgacagacgcccaaaaacaagcttactcggacaaccccagcccggagcatgctggggttgaagcgaccacagaggtccttcgctggctgtgggacactggattcgccgccatcgccagtgatgcaatcagttgggaggtgagcgataagaaagatagaccacaaattcccctcgatatgtggcaagccgatcaagaaactcaactgacagatccacaggtctacccaccacaatcccctgacatattcctccatgaatatgtgcttgctggatggggaatgccgatcggtaagtcgccgggacgttttacccgagttccgcaggtccattatgtatattgactcataaccaacaggggaactattcgatcttgaggcgctggcacggacctgccaggaactccaacggtggagctttttcgtggcatctgtacctttgaacatgcccggtggggtttcctcgcctccgaatgtgatggctattttctaggtccaacttgtctgcggagtacgatgtatatgtacaatatatggagtggtttgtcacatagtcaatcaagcatccggtagtcattgcgggtacctgggtaggattccctatataaaccctattgactggccggctcgtgtggtaccgcaccgttggaagtgtcaaaatttcatgctcgctcagagtgtacaaagtacgagggcaactcgggcgcgatcaaccgtcatggaaacgttgtacattatgttctagactgttcgccgaaggctcgaggccgaacggaccagcggaaaaggatctacgatggacacatcgacacggcaacaaaataatgatacgcggtagagtttcctaatagagataaaatagagagcacaacgtacggagtagtccgtacactttttgcctcgtatttttgatttccgttttcttttgggggccagggtaacttatccaaatctccaccatctgtagcggacggaccctgcgatccacaacctatacaggttccactttaattgacgaacctgcgtcttcaaaacatgccgtcgtgggtcaaaagtgacctctggaaatcatgctgtgcgcaaccacggttgatggagccgttcgggcccacttcccgtatagactaactcaattgcaagcccagaaattgtaattacaacgtgaatgccaatatgatcaagagactatgcaagcgtttgtatgcatatacatatgtattgcttgtgctgagctgctacaagcattttattggcttgatctgggcagttcatgccaggaatatatgtatgtaggtcgagttccaggtcatgtacaattacgatttgtcatttaaatgacagcatgaaagcttgaatgcacgtaaccgtgtatttgtgtgcaccgtgcaccagggtgtacatactacacactgtaggtacaatgtatccaacgtatgatcgtagtgccaaagcaagacagcagaaaaaaaaaacattttattatttacagaccttaggcatgaataagtgatcaatcctgttgtatttgtgagtagataatagagttctgctggttcttctgtttgaaacgagccgatcataggtgatcaatagcccgatttcaacaatgcagcttcgtaaaagcatgtcagtttaaaatttcaatcagggatgtctgaaccctattttctggcccttctattttctagcttcttggctgatattgcttaaaagatggggatgtcttgcgcctggccccgttactggttctaaacttacagcaatccgtgatgtcccccatgccgttgctggaacgaggctctgacaatgcgtccattgatcggagtgtgcagaactggaactacgcctgccagtcattatgtatcattggcatgatggtcttcttcggtctgcgtgtttatactcggttgttcattctcagtggattcgggaagcaggattgtgagtgaaatttttggatggaagcgtacggaacaggtaaatgctgacagcctcaatagggatatgcacagctgcctgggtaagactcctacatacatggaaagagggcaacttaggctaacagaatatctcgaacagttcctcggcatctgttactcaatcattgcactcctcagtatgtctctagtaccacaggtgacaggctatatctaacgcaaggacagtgggtcattacggaggaggcttacactggacggatgtccccgaggagaacaagattcctttccaaaaggtatacaaagcacacgaatgatgattatccagacttctgactctctagactatatacgcaacaatggtcatgtatggaccaacagcctatctcacaaaattgtgtctcctctggatcatgattcgtgtattcagtcccttccggaaatgcgtcatgtttattaaggtctttatgggaatcatgttggcctactacatcccggctgtcagcgtcaaaatccgaatctgcaaccccatcgccaaattctgggaccagagtattgacggcacatgtttcgaccaaacatcgatcattttggctgatgtcgtcgtcagtgtggtcagtgatttgatcattctcatcttgccattaccattaactttgactctgcaaatttctacaaagagaaagatgcgggttatgggtattttgggagcgggcggcctggctgttgcagccagtatcatccggttggcacttattgtcgttaccggacagtcgaaggatctttctcgtacgtttatgagaatcaatatgctagggtacgttttctcagcctatctttttgacgatgcattctaactgcgaaattcttttcagtaatgcggaagtctccatcggcgttatctgtacctgtctcccttctctctcggctctcataattcgaatctaccacgaatattccagcaacaaagtaacgctcgagtccgactacaaaatgagcgcgatacgaaaccggggtacaatggatcgaagcaagaatcaaatgagtgctgtaacgacaggctcggacgaggaggtactcatgcacaatgcacaggcaaatccgaagttcgagacaatcatccacggcaatagtgagaaaggaggtccgccgaaatcgacattcagtggcataggagtgacccgatctgttgatgtgtcaacctccgtggagcctcggtgattctgagtgatacaaagaacgatgtcaatctcgttttagacgataaaccctgcaaactatgacgctgggtcgatacatcctttatatatttaatgatatatctcattttcctttgtgattaatatacggttcttgctgggaagaagccgagtcctgcattatgcctttcgccgtcggtccgatgcagatccaatcaaagagcccagaatcaactaggggactggcctagatatgcagactgccgtaaggagtagaataattcgaactcgttgaccggcatggtccagaaccccctgaattcacctgtcccatatcccatcagtgatagccccctctgattctatggcatcaatatcacaggtccttgcactacattcatatatatctatacatctttcctgttagttaggtatctatagaacaagaacactatgacaggtactacacgggctttgggaatactgcatacgtacctttgcttatgtcggtacccgtggacatatagaaccctcaatgtcctcaattgtataagaaagagataacagatgtacaaaccatggctagaatttctctttaaacatacatttcacttcattcgaagctatttcacgcaatgtaatgatacctctgggagtcttcttgagacatggattaattgcaccacgtcatgactccagtctccaccctcaaacatctagatatttattttgtacacaatcaatccttctgctcatctctccattagatgtatatactcaaaatgcctccctccgtgtctttctctcatcttccagtcgaagtcatctacttaattgttgatctcctcgagccagcacgttacctcaactcgttggcgcagacatgttcgcggctatatctgctcttgaccccaatgctctatcaaaacagcactcgttcatcacacgggttccccattgtatgggcagcacagcatagctccgaagggaccattcgccaagcatttgacgctggagcttccacatattcatgtcattacaactttcaacaatcgctcgtcgcggcagtgaacaacaaccatgagaccatcgtccgactgatactggaacaaaatgaagaccctagtatattcacagaaaagcagagctgcaagctgtgcaaaggccagaaatccgaggccgccgcctcaaaagttctcaatccactatatgcggcggcagtgcgtggcaacgtggccattgtcaggctcctgcttgcctataagatcactttcgaacatggttgcggagaacgtactccgatatgctccgatatcgtatttgcggcagtaaacagcggacacctagccgttatgcaagttctcatcgaggctggctacgcctgggacgacaaaagaagaagataccaggataagacaccactcactgttgcagtcaatcagggtgatgcaagaatggttgaatacttgctggacaaaggggccaaaccctcgcgtgatgataagccacttcttgagtctgccgcggaaaatggacaccttgaaacggtcaaattgctcctggaacgcggagcagagcctcaaggaagcgctctttcctgcgcggctggcaatggccatgtggaggtcgtggaagtgctcttagaccatggggcggatcccgatcctgatatggttcgagattgtctgagtacactctactatgtagctgtaagtggtcagctacaaatccttgatcttctgttggcacgtggggtgaacatataccccaaggacccaaaggaaaaacgctacttgttatcatccataatcgaagatgaactctggcgatcagttgagaggcagaagcggtctgctttcgctgtttcctttcgagccctcgccgattttgagaacatgatagaccacggagatgacctagcacaagctgagattctgtacatagctattggctatgggtgggatgatattgtgcagcgtgttctggagcagagcttttccgcagatggaatatatcagcactgtaagctccggtataacaggcctatactccaagccattcagaacggtgatattggaattaccagactcttggttgagcatggtgccaatatacaggagtaccagggagaaagcaaggatgaaggcgcgctatccttggcaatccaattgggcaatgtaaaaattgcagagcttttgatcgaccacggggctgatgtaaattgcataagcagccgcggagaaactgctttggcagaggcgacggcattggcgtccgaagacatatttcgcatgttgcttgatcgaggagctgatcctaaaatacctttactatccggtcgccaatctttgatagtgactgcaccatattctccagccactgacagtagaattaatgctacagccattcttgatatgctcttagcccatggtgctgatatcgatgaacggcggcttcctagcattacacccttatatcgggtcatcttggatgtcaactccggaaatcagcaggtgcgactcttgctggagagaggcgcagatcccttcgcggtgcatgcttgctatcgcgcactcgttacagaggcaagcgatgacaatttcaactcaatactcagggtcaaacggtcaatgcctagtcccgatacctggcgtcccaaaaaaacgtttatatttgtgccgaatatgagcgaactgaaagatgacccattccttgcatgcatgagacggggcgataaagcgatgcttgaggccatgcttgacgcgattgatcggaaaggacttcccttggaggagttgaaggatagacttgatcgagctcggatggaagcgactgagagtgggaacctgcaccttctacccattctgcaggattattactgggtaaaaaatatccacgcaagtagctgaagatttcaaaatgacaggatgttatttgctaataaattggcttgaatgatgctgtaaacacccgctcaaaggtatattggaagaagtgctctatgcgcaatgggaaacaggcacggtcaaaatcaagagatcttcaagagatcttttcgatcctcttccttgcaatatccatcttggatttcaatctagacacctcgttagtaaagcagatcaaatcaagtggaaaacgtgagcaaaggacatagatgtaaacgaacatatcagactcctcatccgccaacctcagcagatcattctgcacctcgagctcctcattaatctgcgtgccgagttccctctgtcgaataatgatctttctcaactcatccacattatcatcctggctctgcataatctgcctctgcaactgcagcacaccatcgttgtcaagttctcgagttcgctccgtctctttgccaaggaccctacccgcccgagccggcgtcctacgcccactagacgcatctccagcggcattcccagcattcatcaaagctcctttatcttgaatggatgcgacagtatgatcaagccggctcttcgttgccatagcatgcaagagatcctccaagccgtctttttccttgcgcgcattgatgagcaggtcttttcgtcggcgtatctcgcccccaccaagactggacgatgtttgtgcctcggacatcttatctccgcgtccaagatgcttcagtccatcgtccagagtggtgatcatggtccctgcacggacaagactgcccttcgcctgtgcagagctctcatgttgcttctgtggcgttgtttcctggtctctgcgagatagctgtagtcgtgcatcgtggaggtggttcttcatgtcgcggtagtagtcgagccatagcgtcgggtccgtaatggatgcatttgtagcggctgggtctgtgatagcggtgtggagtcgggtggaggtggtggttgagccgttgcccgttgatgcgattgcggtgggaagattgaggaatgcacgccatgcgggcgaggtgcgccagcgcccatcgtcggactcgttaatcgcgcgaaggtatgcctctagcccgcggcgacggtcttcgcacaatcgttcattcgagacggttttcgaaaaccaggttttcgaaggcagaggagctggtggaggggcattcgtttgggagatgagggtgctatggaaggtcgagaagtccgagtagcgtttgggaaccgtgaaggagcggagtgggaggcggagggtgatgtggtagacggtgtacggcggggaagtatttgagagggtagtattcgggatcgctatctcaacggtaggcgccattttgattagaattggaatgaaaatgtcattgttctcaaaagtcggggtgtgagatagaatggatgtcgagcttggagtccgggcggtcataaggatgacctcctcttactccattgccacctgattcacagttgggtcggaatattcatacaagaatcttcagaccttccttggcttttaagaatagtcggccatgtttacagcctttttatcttaagaataacatgatcaagttaggttactggtggttagctgaaatccgccgaggcctagtatctcgtcgtcggttgaaattcgcaacgatcaggcactacgtatagaacacaaggcattggcacgttgtaacacgaaattaatattaagtaacattgggtatctcatacatgcaagtcaaatccatctattcccagatctctcgttcctccaaaagatcccgctggccaaagaactcaccaaccaccataatgatcatatcgagcacggcatgagtctgtatcgaccaatcgtcgtcttcttcttcttcttcttcttcttcttcccagctaccaggcgtctcgacagagtcggaattggtctgcagggaatcgttctgcagccgagctcgcaagcgcgccttggctgcttccaagtcggattcttcaagcgataatgcgtcagtctccggcaatttcgcttgcttacttcccgcttcatttggaactggaggctcacgctgagccttttccttgttctcctcgccttgaaatgtaggttccggttgagtttcctgcttggtcgcttcctcattctggactgtagatctctgctgagcttctgccttggtatctttctcatcctcgacgagatcaccctgttgggttttgtcctttgctgggcctgccacagaataatcggcctcctcctcataatcctcgttctctaactcttgcaccttgcgcaagatagtcgcagctcgtttgcccagatttcgaataacacccacctctcgggtagaaagttgtccaacctcacggcaccttcccaataggccccaagcccaagccccaatgcgccgtacgcgctgagtgtcgtcgccgcgcacaacatcagacatcatccgcgctagtatttccagtacttctaacacgctgtccatgtccatgcttgccagttggaccatacgtggttcgactgtgaccaaaagccggcgccatgttttgtgcgcagatccggcctttcggggcagactgatagggtggtcattgtcgagggtattgatagcactggcaggtggactgcattttagggtcgatcgcaagaggaggaatcgatgtcgcagaagattgttgtaggaattttgcgcttcaggatagagctcatcgagctttgaaggggaatttgcggcgttgtttgtgttctcctccacaggcgcaatgtaggcttcgtcctcgtaaaagcctggtagtagatgagggtcattcggttcaactagcgtcaaatctggttgcatatttgatgctacttttgaagggtctgtggtcggagtaggtgcagagaaaagtatcggtagtgagtttgcttcgaatctatcgagcaaaaattagttcaaacttgaatcacgacggacaagcctcgacatcattcaggcaaagcaaaagctatatagatgcaggatcaggcataccgaaccacgcgtaagtattccaatccatcgtccgggtcgttggagagtaggtcatcgcctccatcgtccaaccccgggaatgcgttcttctggccataaaggggattatgacggggatgctcataagatgccaccgaagcttcgtcgtgttcatcattttcataagttatccgaggacgtttcaacgaaggggccgacatggtgtcttttctcttgtcgggcagagtgaggtgaagatggtaggtcctgtaggatcgaaggagcttgggccaatctgcagaccggcttgaagctcttgtaacgaatatagacttgaccacctatttcctgaataagataagagactcatacgataatgaatttgtattcggcagttcctgacaatatttccagctttattctgctcattatcttactgctatcataatcctagtgaaatttgtatacaaccgagcccaaggcggtgtacaataattgcttatcgaaggcggggacctggatctgccggtaaaaaagataaggatcgtcatcggactatcttcacatctccaattatttgtgtctcaatccaccccatgtcttttttatctttccttggaactttttcccttctacttccatgctaaatcaattaataatcccacttcacttgagatgacctgtgtctttgcttctctcggaagcggttcggtctctctgttgcctcttcctcgccatcttcatccttaattgttacgaaacgccacacataatattttcgacacacggattcttcacgatatcaatttgaaaccttcttgtttgttctacttgtaaaatgctaaggcgggtcgactccatcgaagtcatgacttctccccaatgtgtttacctccctacagaggtcttaatacacatcgccaaattcatttttgatggttggaaaaataatgccgaccccccaagttatcaagtcacgcttcaaaggttttgttcggtctctcgccagtggtactctgctggcatcgaatttctctactaccgacctcaacttgacgaaggaaatagcttcttgcttttcaccaacactgtgtgcccatcgattcgctcccgaggacgaagaaaagtagacttgggttcgctagttcatgtcctgaacctcggatcattggtccaccacagctcgaatagcctaacggcacggcttctaggtcgagtgaagaagaacctgaggacttttgttgctccgaggatctctttttcgtaagtaaataatggctatcacaacataatatccaacctcaagctaattcctctccacaggatcaacagccttgcacccttagcaaaatgcaaggagctctgctatctttctctccacttagtagctgagccaatcgcgcttcctgcgatcaagaaagccattagcaatatcgacaaattgcaatcccttgagctttcatctacaactctcatcacagacgatagttccactgaagattggccgcccaatctaagatacctccaggttggcgggcaatttgttacagatagaatgtattcgttcaaatggcctcccaacttggtatcgttgacattatgtggttgtgatagtctaaacactcccatcttggaagatattctcatcaatgagcagctccgtaccacacttacgcagttgatcattcacagtgccaatagcgagatgttcaaggagggaccatctgggatcttacgcgcactcatggctttagagtctcttcgaatacccattgatctgctttacgaatttctcattcttcctgcattcgactcaagggattctccattgtcaattcgtggactggagctcacggcaccatataacgagaacttttctacagtcattgatatttgcaaggccctgaaaatgaatctctctcgattgtgcgctcttggtatcagcgctagctgtcttggaataatacccgaagcatcacatgccaaaatcgacaagtgtttgtggaagaatattgataagtgtcctgaggaagagcttgattctctttttgacttgggtctctatgtcatggctgagccaatgtgctaaagattcattcatacattcttatgaagtcttatatatatatgcctctctctgtatattagccgttgatgggtcatgctactgccccggcagctatctttctagcaatgtacaatagcacaacctataaaacagattgaagcgagagtactagttggacttgagaggatacatttcaaggagaataatgatgcaccgacagcgaaaatgctggctaatctgtgattgtttggttattctccctatttgattcaaataccatggtccttttctctaaagcctcgaatcaaaagcgagtgtaaaagtttgagagtggggaaatggaagttcggagggaaagatctggccggcacggtcccgggggaacctggaaatgacgtacatttccttttgtacacatttcccaggatcacgaccacaatgagatcgcaaaccctttggcggtcatttggcctattgcagcgtcaatccctctctactcataaaactgtcacccgccgagctatccaaacagctagttctcgaccgatccctaacttcgcatttgcatttgagtgagtcttgaccggcgaacacaattcactcgattttcttctcacatgctacagcattgatggcgtcctcctccgcgcatcgaaacctttgcccggtgccgccgactcgcttgctctcctgaagaaacaaggaatcccctttcttctgctcaccaacggcggcggtaaacacgagacggagcgtgtcgcggaaatcagcgagaaactaggaataccactggatgctacggacattgtgcagagtcactcaccctttgctgagctggtcaagggaccggacgagtcgagcgccctggaacacaagtgtgtgttagtggccggaggcgatggggataactgccggcgcgtggcagaacggtatatcaaggaccccttcctattgctgaatgatatatgctaattaatagtaataggtacggcttcaagaatgttgtaactccggcggatattcttatggcaaaccccgctgtctgtccgttttcgatgaacttcagcgaatattataaaacatttgcccgaccgctcccgcaccccgttgatttcaatgatgcgtcgaagactttgaagatcgatgctgtctttgtgttcaatgatcctcgtgattgggcgttggacacccaggttattatggacctcctcctctcatcgcaaggccgtctaggcactttgtctgaaaagaacggacgaatcgatcttcccaatcatgggtaccagcaggatggccagccccatctatacttttctaatccagatttgtggtgggccgccgcctaccccttgccccgtcttggtcagggcggattccgggaagcgcttgagggcgtctgggctgcggctacaggtggccccagcaagggtattgagttgaagaagaccgtgatcggcaaaccttatcaacccacctaccagttcgcagagcgtcaattgcttcggaaccggctgagaacatttggaagctctgctgaaagcacgcccctggaaagagtatatatggtcggtgataatccagagtcagatatccgaggagccaactcctatcgcagtgaaattggcagtagctggcactcgatccttgtccgcactggggtataccgtggcggagagcctgcttggatccctgagacaattgctgacaatgtacaaaaaggtgttcaatgggcactgaagaactcgaactggcctgctgcgtgattatcaagggacgctggatactctacattgatatgaagatcggcatcaacatggcgccaatctatgtttatatgtgtttgttccaaatagctaccagcaccaatccacataattacctctgaagcattttttcaacctatcatgtaataaaaaaatgtagatacaactgattaacacgcatggatgtactccgtacatatacagtcaaggtagatctgcctaagtctccacaccgcctacccctcttagggcttgatcattcggcggggtgagtcgacgaaacagttttctccgcagctctacttacaatcagcctgctgcattaactcctgcaaatttctcaggatagaaaatcattaacgtaggatccaacatacctgacctaacactttgctccctctaattgtctttgcagcaccatggccgactccgaattgccccaccgtcccaagcccgaggcccaggatgcctccgctcccgccgcggaaggtgagaccaagaacgcaagcaagaacgcactgaagaaggccgcaaaggataaggccaaggcagagaaggctgcggcgcgtgcagcgcaagaaaaggcccaggccgccgcccaggaggccaacgacacggccaaggatctatacggccctctcccagaggccgagaacgccatcccgtctacacgattcagcgaactctcagaggaacactacgagaaggaggtgacagttgtggcgcgtgtggacaatgcgcgtgtgcagagtgctaagcttgcattcttgatgctgcgccagcagggacaaaaagtgcaggccgtcattgcggccgcggagcccatctcgcgacagatgatcaagtacaccgggggcctgaacgtcaactcgattgtgcagatcaccggtattgtgaagaagcccgagattccgatctcgtctgcgtccattagccacctcgagatccacattcgcaaggtctatatgatctccgaggctgcgcagatgctccctatgcaagtcaaggatgctgagcgcccgcccccagagagcattgatgaaggtgctcaggttgatgccgagggtgctcccatcgtcaccctcaagactcgccttgataaccgggtcctcgatctgcagactgaaaccagccaggccatcacctggatttccagcggtgtctcccagctatttgctgagtacatgattaagagtggctcccggtggatctccacacctaagctggttggtgccgccacagaaggtggcagcggtgtcttcgaggtgaagtacttcaagcgcaatgcctacttggcgcagagcccccagctatacaagcagatgtgtatcgccggtgatatggagaacgtattcgagatcgcccccgtattccgtgccgaggacagcaacacccaccgccacttgactgaggtatgacctactgatatattttcccgaacaggaaaaaaagaaacagattattctgacatgacttacagttctccggtctcgatttcgagaagaccttccgcggccactaccacgaggttctggagttcgctgaagacctccttgtcttcatcctcacccagctcaaggagcgctacgcaacccagatcgccaccatccaaaagtcctaccccaaggccggcgacttcaagcttcccaaggacggtaaggcgctgcgcttgaactacatggacggtgttgcgctactgaaggaagccggtgtcgacgtctcagagcaagaacgcttcgagaacgacttctctaccgcgatggagaagcagctcggccaaatcatccgcgagaagtacgacaccgacttctacgtgctcgacaagttccccatggctgtccgtcccttctacaccaaggccgatcccgacgacaagcgcttctctaactcgtacgacttcttcatgcgtggcgaggagatcatgtctggtgcccagcgtatcaacgatatcaaggagttggaggagtctatgcgctctaagggtctcgagcctaaccaggagggcttcgaggattacctcaatgctttccgccagggttgcccccctcacgctggcggtggtcttggtctaaaccgtattgttatgttcttccttggcttgcctaacgtccgtttggcttcgctgttcccccgtgaccctcagcgtctgcgtccttgattttgcactgtgtggaattatctcatggcattacaagaagcatataaaaacaaaatcttttagctgtctttcaaacattcatacttttattttggtcgtaatatctgtggctaatttaaacaaacaattttgacccttgtctactcttaacttaaccaacggacaaggcagtgttaagaatcaagctcgcgattatacactaatgactgctacactgtgagaaacatcaagtgtatgcatgaatatgatatgatatttggatgaaaagttgcattgacaagttttgaggggtggacgacgcaatctaacgaaccaagacacatgaaaaagacacacgctcttgtccccccaaccaggattaagcacgtaacgacaaaaagaaagggagagaaagggattaagacacagaagcaatcacagcggcggcgacgccctcttcttctgcccgaacggtgatcttggtagtcacaccggccttgctggagtaggccatcttgatgagagcagcgacgcggccaccagagacggtcttgccgaacagcttgagagtgtgtgtgctgctgttgagggccacgtcggtaccctctagaggttgcagagatagcgctgagatcagttgttccgtggcatctgggatcaaaagcgtgagtatttataacatagagcaataaataggacttgtacataccgttgatacccttcatgttgctgagctgcagagtttcgctttcctcctcgccattggcgccagtctgctcccagacgtggtcgaagctgccggcgaatgtcgggatgacatagtcactgcctgtcagctcgaggtcctccacctggtactcgtcgtcgtagccactgtcctccggctcgccgcttacgggatcgatttctttgctagtgaacttgaggatgtttgtgaaggaggtgacggggacgctgttctcgccggtgagcttcttgaaagcaacgtagacaacaccaggctggtctgtgggcagcttgggggcaggaatgataaagtcttcctccaatacgtcctcttcttctggcgtggcaaccacggtgacattctcaagaatagtatccggaagtgtgttcttgatatcatattgtaccacgatgtgttccttgaaaatgtgcttgacggccgtaacaacgtattcggtttcgctctcggaaagctcgacaggcgcggaggacttgagcaaaataccgtaagccttgatatcggggtactgcagaagttgctctgcgtatttctgggtggcagaggcgctggctgcttcggccataccgccgactgccttgcccttcgggggaccggtcgaaggcgccttgagagtgggagtagctgaggtaagcttcttggtcctctcctcggccagcgcctgctcgtgtgagacaaccggaatggtggcaacatcgaaggcagtagcgaatgtccccttgtcaccagacgtcacatacatgacgagctggtgttcaaacgtggaaagggaatacattgagtctataaccattagtaaaattaccattgctagtcatggacaagaccttaccgttcttaatgaaagcgctcgccgactcatcgtcttcactcatcagacgcaggttaagcgcagcacggtctcgcacctcgtcgtcggtatcatcaagacaacgggtgaggagaacatggacactagacttgacttcggggtctttctggccaacaccaaatttggccaatgcggtgacagcagcggcgcgtacgatggcgttctccaatacgacgcggttgtagatgtagcggatatactttgtaggatgggtagtcttagggccctcggaaccaagcaggtgcaggattctaaccgaaagcttggtgaactcgcaatcctcaatgaactcacagaggtgagcaagcgcatcttccttgctttccgggacaaacttgatcaaatcgaacatgctctcaacaacagtgcgcttgaactcgtatccgccctcgtcccgcaggataccactcaggaaaacgagcataccggcctgcttgctggggaacttcaaacacaaagtgcgaatagcttcgacaatagtgaccttgaactcgtcggtgatatcagccataaagcccgagatttgcttcatcaaacggtcaacgctggcttcgttgccagtcttgagcagtgtcgtaatggcgaacgttgcgattgaacggttcgagttagagataagggactcgatatcagggttgcagacattgacgacgtgtggcttgaaagaggctaagttgtgtaggatacggattgcagcgaacttggtgattgaccggggggaggacaggaagagctggagaacatgaactgcctgcgttgcctcggcatcggtgacatcgcgcatatcgcaaatagccttggccgcctcaaagttgaccatctcatgcttgtggcggagccagccatccaacatctgcatcatgggtttccggagaccttggtcctcctcggccaatttggccgccagacgtaccaacaaaaccagagcagccgggctcttcaccacacctgcagcgccgtactgttgtaccattttgaccaaagacatgcgatcgtgcgagcgcatctggtacaaaagaccgatggcgtggtactgtgtcatgaaattcgagttcgagatagcatggctctgtgagcctgagaaaccaaggaacccggtcgatgatttcgatgacgaggccgcttcctgtgtttcgctctgccacctccggacaacgtcgcgcgcaatggggaggagatggtaggaagagaccaaggccgcggaggacaccgacggggtcttgtcaacaatggcggtcttgataagtcgctcgataccctgtactgtggaacccttttgcaattgtcagcaaatcccctcaaccattgaagtcctcgcgaccgacgacctacatcgataatgcggcagagcgctctgatggcattggcccggtacaagacatcgcttcccaccgcagtgtccttcataatgatacttgtcgacatgatcacatcttcggcggtgccagctagctccttcaagatcaggtacaccatctgccgcaatgacgggtctttgttctggaagagcttggagattccgaagaagagagtggtggcttcattcgtagggaactgctccccggtgaacatgaggacagcgatcttggtgagtaacgttcggcatgttcgcggcgagataggagaggaattgaataggcgtgctaggagagttatctcgttagcattgaatatgtgcagcgcatgtaggcgccagggggtattgttcattacacaccatcttggaaaacggaggtccgatcaagcttgatcatgacctggtcctcatcttcgtttttcttcatgtaactcatattgcccagcagctggaattgcaccagcaatgagtggttgccgtcgtattagaaaggtggagttggtgcaattgggacacgggtcgagtacacagaagcagggtagggcggtgtaggtgactataacagttgcataaccacgcaggaattggaggcttaaagagggtaaatcggagaaacagacaaggatataatcggggtaaatgcggtggtagtgaatctcgaaccctcaaagctcagaagtgccagctattgacaagttgaaggtggccttccgtgtgtttggcccgaaccaaacactgcaaacaggtggcatcacgatccaaggcagcgcattcatcccctctaaaccccctcattccctttgtatttcgcttggatcgaatttaatctatacatctttgatcatttcaatccaatatgcaggttgaagttgaccctaaggaggataccgagtggtaagcatatttacttgcaatatacccccgctaccggcaaggtataacctgaaggcaatggctaacccgttgttgaatattgcataggaacgatatcctccgtcaacatggcattattcccgaaaagcccaaagaccccgaacctctgatccaagaggctctgatcgccgcacagcacagggcgcacgagaaccgactcgaggacaaggaccttgatgagctagacgcactggaggatgaggaagatgagacgtttctcgagacttaccggtaagctttgatgtaatagtaagtatacctaaaaaggttccctttgctcacggtaccaatcaaacaggcaaaagcgtctcgccgagctctccaccctccaacaaaccagcctgttcaaccaagtctacccacttcagaaagtcgattatgcccgcgaggtgacagaggcatccaacaatgctttcgtcttagtcaacctcacatcgatgggcgggaatgttgaatcgcgcgtgttgacggagctctggcggcagcttgctgccaaattcggcgatatcaagttttgtgagattcgtgccgacatgtgtattgaggggtatccagagaagaacacgcccacaatcctggtatataaggataccgagatcaagaagcagcttgtcacgctccagcagttgaagggaccccggaccaagatcgaaggtaagttacgttcaaggcaggagtgaaataagaattgtatactgatcaaatgcatagatattgagcgtttgctcgtggagatcggtgctttgaaggagagtgatgtccggctgaggaagcgtgatggagaggacgactacaagaaagacgatgatctgaacgttgaagattatgatgatgattgggattgatttccttgcgattgaaaatactgcaaatgttatgatttggcttgtgtgtatgtatattatgaacatatccaaaaatgatgacccccgttctacgtcgacaggagccaagagaatgataccttgttagccccgattggaattacctacatgtgtagacagtttcttgccatataggctgggttgcatgatggcgactatctagtaaatgtggatactcgaaaccatgcgaactatgtctgtagccacccattgcaatggaggtaaagaagccaaaattcaagtatatagcccagacgctgataaacgcaaccgaatcacgtatatactgaattaacaacgaattggatgacaaaatcgctgttcatcccatcaattccaacgccaaagaacatcaatcataaccgtatcagcggtacccggagaaaaaggataccgcatcaaatcaactcatcacgaccagcagccgcactttcctcaatagcccggcgcacctggctctctttaaaagcagggccctgtccgtcacactgcgacatacccttcaaacgctccgtgacatcaccgatatcaagttggccgcgctcaaacagttcatgtttctgaataaggtcccacgtagcacccgcatccagcagcttctcaccggtaatcggacacacggtgagacgatggtgcaggtttcgagacgtgccagggctgtctgccataaacgtggtatggaagtctgttggggagtacttcattgggcccgtaaccgttggttcaggattctcgtttgcgccgacatgtccgcggttggcctgttgtgatgtcgcgcgcaagatctcattctcggttgtgtaccgggccagctcgcgcttgaggcgctcgttgtcggcttgtaatgtgttggaggcttgttcgaggctatttactttgtcttcgaggtcgcggacgtgctgttccttgcgctcccggaatgcccgctgactgtgtaacgagtggaacctgttagtgtttgctttacggggatagatgtctctagacacgtgggttggatatgtcacatacgctgctcggttttgtgccttgcgcttgctttgtgcgggcgctgagtccttttcctcgctgctactcctccctaaagctgggtcggcgaattgagtttcatcgccgtcgaatgaggtggggcgtgtgtgctgagtgttggcggcatcgctggaagcagagtgcttgaccgagtctggcggtgaatgcggtggcgggacaaaggaggggtcggcagggaatgggggtatatagccagggaagttttggtaattattctggtctattagcgacaagttcttgacggttaggggggaacaaagaacctaccacaggggcgaatgtatctggttgggcatggggttggtcgggggtaggcagcccgtagagcgagaagcccgagggctgtgatcggggatcatagaaagagtaatccattacagaatcgtagacagattccaaggtctcgagggcttgtcggaaagttaggaggtgagggtgggaaaacttttgaggaaaatctattatctgctcgagtttcatgtaccgggggggcgttccgttgtacgatgtacagaattcaatgttgtcatgacactcctataccatctcgattcaaggtatacttccaaggtctacatgtaacctctcgaatgtccatcgattccaagagtgctcggtgcatgggccaaactttcgatgatctcatcgttttttactctttttggaccgggaagtacggatgttggggcgatggcggtctggttgcgagttgaatagcacaattccagttgagatgggagtaagcaaattgaaagtgcagtgtagagaaagctaagagaaataacttgacacaaatcgacgcataccaccccggaagcgaccctaaccaatgtccgtcgccaaccacaccagtttcctgcagagcgggattgccctggaagccttctgtaacggtaatttctgcaatgtagcttgagcagaaatccagaaagcctgcagagcaatgctcccgaaagctttctctgtcccgaaccccctcttggccatattggaggccacacctcgtccccgttgagcgtcgatagttcacaaattaatcatcgccagataaacgcaagaaaaaaagcaagggaggatcgagggcagagaagaaacatgatgagtaaagaaaggggggtaagcaatgattggcagcgcatccgaagatgcattcaaggatctccattaccagcgattaaacaatccgacaagaaaatttgcgggctgaggccgtcgtttgcatctcccttagtcttgccctgtggtcattctgaccgaagatgccaggttgtaaagagaaaccaaagggcgaagacgtaagaataagccacaatatcagaagcgtttcgagatgtgtaatcggttgtcccgcagaacgggtacaagaatccgaaaagacagaaaaatagtcgataaagttttcgcaggctcagcacaagattgtccacccaattggcaaagctttcatggggcatagagcaggcgataaacagaagcgaatcgaaacggctgagatcgaaatctgatcgaaaacgggataggagggctgtcggggagtgcagaatgaatagagatccaagaagaaaaaaacaaagaaatatccgagaaggctgagtgcgacatggtccgctctaaggcgacatgagggtccccggtttcttagtagataagaatgtgaacagacaggaggcacatatgacacatagcctcactgtcgtgtaaacactattagtaccagtgctcctccggtcctgcgtccggcttcgaacggccaccggagggtccataacccaaagcagcacctttcgaggcagaacgtagcctaacgccgaagactatgcgattagtcagattcagaacataagggtcctccacgccagcgtcacgaaatgcaaatcactcaacgtaggagataagaaagaaggggttccctactcggaaccaggtttcatgtactcacatcctgtcactacctcccacggcacggttggtgtccggagtgtcgagggcgccgcgttcgacgaccttacgacgctggctggagatggcaccgggcttggtggcaccactagctccaatctggccagtagcaggcagagcctggcggcgctgctgatcctcggcatccttatccttcttggaagcgtccacgatcatggcagcgttcttctggtacttgtagacggtccagtcgaagacgtaatcgtactggaaggactcgcggacgaagaggtcgcggaaaatcttgcgcaagtaggagtaatcgggcttgtcatcaaagcgcagcgaacgggtgtagttcaggtaaatggcgaactcgttggggaaaccacggcagaggacctcggtaggggtggtcatcttcttttccatgatacggtcgtacttctgcttcttggtagcagccttcagaccttgccaggggagagaaccacggcagaagtagagcatgacataacccagagattccatgtcatcgcgtcgagactgctcgacaccgaggtgagtgttgatactggcataacgggcagttccagtaaggttcttgttctcacgatagggaatgtggaagtgagtcttggggtcacggtatttctttgcaagaccgaaatcaattacgttgacctgattgccacgcttaccgatacccattaggaagttgtcgggcttaatatcacggtggatgaaggacttggcgtggatgtattcgatgcgggaaatgagctgatcggcaagaagaagaacggtcttcagcgagaacttgcggttgcagaagttgaaaagatcctccaaactgggtcccagaagatcgatgaccatggcattgtaatcacattcggtaccgaaccaacgaacgaaggggataccgacaccaccggcgagcgacttgtagacacgggcttcatattcgagctgggggtgcttggccttaacgctctcgagcttgatagcaatctcctcaccggagatgatgttcgttcctagaaattatgagttgctatgaaggggtaaagcaatatctgttatatgcataccgagatagatatcaccgaaactgccactgccgatcttacggccaatgcggtacttgttaccgactcgcaaatcctggaggcaatgtcagtaaaactggtggtttggacatctcgttgacaatcagaaagtcatggtataatccgagcgtaattttctccagccactcgaggtatgactccgggtgaaaaagaaaggaaggaagaaatcgggtaacactgaccatggtcgtcatcttgaaccgatgggggcacagcgcttagccgtgaggaaggacttgaggctagaagattgagaattagtgttcaaatcctgttgacgaagtagaactgtatgcaaagctgatatcgatggagtatagaggggtgcaaaggaagtggagaggaagaaagaggtgtgaggcaaagaaacaaggaagtcaatgagaggggttgacacctaagcctcaggcaacttgagagggctgggccaggtcaacgaacacagcagaaacacaacacactttgtatatgatgcaatgaagtacatagggcaagggaatgtaacagaaaactgaaagtcaaaaaggcaaaaaggagaacgactcgatctaggcatacctgaagataacgggaccgaagctgtactgaggtcaagaataggagatgagccgggaaggtccggggggggggaatatcgagagaataaagaacaagggcaaagccttgaataaaacggagagatgatgctgagagccctgaagaaggagaagaaagaggagaggaggtgagtcggtgagaatttccttttggcggtttaatatgcaggggacggcagtcacgcccgaccgtggtatggtaagattggtattgggcatctatagacttttacgtacattttacagtcgccgtaggaattggtatagattcgtattaaatcatatcagatatcagaatgcatacagtcactatatctttcttgtcaaactccatactcacacaatccatggattacgtctcagctttggtgggtatgcaatccctcaactgaccggtaggtggtcaatgagacctgtgcggacaacaggcatcaagcctataaccatgcgctcatcatcggagtgatacccaatctaagatgtgtacgcttctcatttgaatcatatacaatcatattgctcctcgcgagacatgatatccgcagtggtcttgcttatgcatgatcatcaatcaacaataccagatatcatactccttagtatgcgcgattttcctcaatgggaaagtagtttcagtctattaaggggcaaacgtggagcgacctaactagttaggtatcacacccggttactaactattgccaacagtacagagagagtatgtacttctacatcgtagagtaaaaaaaggcattgctgcagagtaagtctgtacctatcgaatcgggctgatgacaggtcatcatttccaccctggtgttgtcgaatttacaacccttcaggttatccttatcataatgggtttggtgaaagataggagcctccacagggcaattaaagcgatttttcgactatggatgaacaaggaatccgcgtggaatatgctagtggtacagccagagtccaatgaacatcagaaaaccggggtataaaaaggacagccaggaggttgaagacaaaatcaaaactggaaagggaaagggcagataaatgagcgcaatggcgagacggaatcagaagataacaccgtgcatcgacgtagaggaacagagaagatgaaagcacacatcatacatagaaagagagtgggaaaacacaacggggaaaaaaagggaaagtattgcaaatacaggtgcagaacgctcagacggtgcaaatcacatatcttagggcacatggtcatagaacaataatggagagcatgatctctagatcacgttagagtgttcggggtgtgcagctccattgttcaatggcctggtttgcacatcaaacccagccctgtcatcatcatccagtcgccttctccattctgccaagctatcactcatcagtgcgggtccatcactatggtccttggtaggagtccgctccagatccagctggctgctcagacggtaattgcggttggtgctttcccagtgacttcgcaaagcatccaactcgttggcaagtgaatccagagccatggaaccacgattatcggggaatgtagaatcctgagaggcattgctaccagctcgtggtcgcccattgactccgctgatggtgttgctagaggcgttgctgtgtgtgcgcgagagtccaagtccattgggaccttgcccgtggtgggattgacggcgataatgaccaactgatgtttgaacctgctctagaagcatgttcaccttacgctctgcatcggaagcacgagattcaaggtgggtgttctcttgcttgagctggttcagctcggcacgacttttctcagcggcagtacggagatcttgcttaaggcgctcatgttcacttcgcgacaactggttctcagcggtggcttgatcgagatcttgcttgagctccgtgatctgactttcaaggctggcaatagaagaggcagttcgatcttggagttcggacatcgaaagctcaaggcgggaccgttcagcgtcccactcagcagaagatccaggtgtctggctgtctgaattctcaaggttcttctgagccacatccaattcagattgcattttagcattttgagccttataccgacttagctcatctttcatccgcttcaacatcttctcggtgcctttcacgtaatgaaccgctgactggtaatcattctcaagttgctcaagtttctctcggaaagctcggtcggcttcctgctcacgactttcaaagccgttcttcaggtcgtcatgagccttgatgctagccgagagttgttgctcaagctcccgtagtcggctttgctccggagtgccgaatcgtgatccgggcgagtcaagccgtggggaccgtctggtgtcactgttcaccccacgctcaccaagaagatccttcaaagcagcgtgctgagccgctaaagctccagcctctcgctggtgagtttcaagttgtgccttcaggtcccgattagttgtggcggccgattggctttctttcattgcagtctgaagctgtctgcgcaattgcaagccttcacggctagcctgctcctggtatgcttcaaggccagcaatccgttcctctgcacgccggagcttatctgaggcttcgttggcggctgcctggttagccttggctagagtggtggaccgctcgatctgggcctccatagcagcgactcgctggtcagcacgagatcggaacgaatcagtcaaatctgtagaagatgcgcgttccagcccagacagcaaggcaagcttgtgggtttcagcctccttcgcgtggatctctgctaatgcctccgcatctcgaaggcgacgcgtaatgttctccaaatcagtagtccgttcttcatgctccgatcgaagctgcagaagctttctctccagaccctcgcgacgctctcgctcctcttggaattgcttctcgacgagggctgtcttcgcagtggaggcggaaatagcttctcgaaggccgccaaagctagaatcatagtcctttaaacgggtggaggattcctcaatctgcgccaacaagtcttctttgtctagaataagttgttgaagagaggcttccgcttctccacgcaagaaagcctcttctctggaaagagcctctgcttggtggagctcagcgcgcagattttctgcttccagagtattgctttgcatctcaagctctgccaggtgcttccgggttgcctcattcgtctcttcggcaagctccttggcttgacgctcctgcgaaagctctgtggtctgcacatctaatttagctttcaactcggatagggaggccaaagcgagggcaaggcggcgtcccatgtcggtgggtcgctcgtcatctccatcgcgagaagcatcaggctggggagtgcctcgctgactgccaccatgagcagcgagcttcgcacgggagtatgcggcttcattgatagccatatcgcgttgatgttccacttcagcaacccgtttagatgcgatggccgcttgtcgatccacagtggcctgcatcttgctcaggtcagctctcatagccaagaatgcctcaaccagcgggcgatcctcatcgctcagagcctcattagcccgatcgtctagcgcggggctactggttgcattgggaacatagccacattttcttgccagtgcgagttcggaggcataccaggcattccgggccttggtaacctccaactcttttatcaaagcctcttggtggggcgtaagtcgaggagaccgtggctcatcaccaagtgtcttggagttgcggaaggtccgagattccaccgaaccctcgatgctagtctgccgaccgaggattgattcctcaccgctgtcaacagacccacgctgtctttgagatcggagcgaccgttgtcgacctggggtactgatcaacggagctgcctcgcctgcttccatggccttcgctgatggcttttgatgttgtgttggggttcggcgaccagctgatggaggtccctgggaatcttgcggaccttccttcataattggtgattcttcgccacgctcgtcgtttgctccacggatatccgcggttggtgtgtatccgcgatcattctttgtcggggtcttgctacgagggttcgcaccagctggagcgccattaccacgaggcccaggagagggtgcttgtccaggaggcggtgggccagcaggggcttgggcaattgatgcccgtggcagtcgagatccaggtcccaaatttggattggggccgaactcacctggcctattaccagccgcaccgtgtgtcatgctctcacgcgatggcgttggcccacgtcgcatttgcggttctgggactgcgttttgtgcctcgcgagacgagcgtccagacgagattccaggtttatcaacacttgtttttctggtcgccggctcgggaacgcgtcccccaggttgcgaatcattggggtaccggatcttgctagtatcgaggatgtaggacatgctaagctccgccgagtccctaggagccgagctcggctcacccgccataacaatgatctgcttaccgaaagcagtcatgctgtgaccagatcgaggggacggcgcagggcccatgttttgaaaggagtaccaacgtcgagttgagatgcggaaggctgacaggtctcccaggtccacaccttcatccgtgcgacctccgaacacatacatcacatcgttgaccaaagcagaggcatgaccctccctaggagccgggataaaaccaacgcaatcaatctcggtccagctgttggcgatgtaatcataagaccagacatcattgaaccactgcactccattcgtacctccaaatagatatagcttctcgttaaaactgacgatagtgtggtttgttctcgctggaggaatttggcctggcgggggtccgccttcgtgactgttcgggatcaagacctcccatttgtttgctgggttttgaagctggttcaaatcaaaggcaatcaaatcattgaagaagaagccctccacttggcctccgaagacgtagagtttggagcctaggatgttcaaagtgtgaccgtaacgcccggaaggtcgagagccgggaggaatcgcgcgggaccattggcgggaagctaaaaagataaagagtcagggtcatagtaacatgaataatcgatgccatccttacatgtgttcaaaagatacagggtgtcgtcgagagaatcattctcgtcgattttggtatcaccgccgaacacaatgaacgcattcccaacaagcaaactggcatgaccaactcgcgggccagggccttcagataccgtcgcaacctgcagacagttcaagcccccaccactgctctcaatcatccaaagatcacccttgacggttgatccatcgatcaggcctcccatcatgtatatgtctccttcctttgatgccaccgaattgattgctgctccataccgaggaaatgggttcatctggggagaagagaagttcaagcggcgttgcgaccatgggtaaagggatgaaccggggcttggatgggggatcccgttgggcggttgctggggtcgttgcatctgtcgtagacattagagctatgtcctcgtcaaatagcgaatggatcgcgaaacagatacccacctgggattccgattccgctctctgtcgcggccgcactgcgtctggactcgtcgggcttgcggctgagcgtagagagttgctgaaactaccgctcggggtcggtgtctgggaatttgtgccatcccccttgaccccatttgccatagtaggggatccagcgggtggagcaccctcggaggtgtggacatttctagttgccggggggagtgcagctgcagccgcctgctgactgtgctggtgcttcttcgatttaaacagaaaggccatcgtaatttatgtggtcgtaatcggtcgtatcaggggatctggcgcaaagtcaagctgcgcctaagtgtggactcgatccgacacccaaatatcgaaagaatggcgtggtcccgaaagattaagtggaaaatccgagggataggggagttgtctatttcagaagtgaagtgggaaccaggaaccactaggaaccataaaacgttccatgcacaagccgctcagcgtccccccaaaaaaataaatgtgggcagggggaggcttctgaacagaagcattcgcactaagaactcgaaaaacaaatcaaagcggcaaaagccaagggaagaaagggggaggttgaaggcaggaaatgtgaaagaggaaaagcgaagatggaagagatggccgtttcaatttcccggagatgctctaagtcaaactagtcttagtttcattggacatgcatactcaggggcatactatcactcgaatctttacttcaatgcttgtcttctacttatatcccccgtactgcgtacattatactatttccttcattcctttttcccagtctcttttttccagcctccaggaaccgaggggggattgacattccaccatatcagcgacacgtcttgagcattcggatgttagatgtcggtattcccaaagaaagtgaaaattatatagaaaaaaaaaatatataaatatatcaaaactataaaaaaggtttcacaacaatgtcgcaaagccttgagaatattgagctgcattatatccaagggttactccgtacttcaaatgccgtccacagccctggacctggaggcttgtgaaccctgactatcacactatcacactccaattgctatatgccacgggccgaggactcgccacggtgtgaacaaatgcaggtccaataacaattcatcctaacactgcatttctggcgatccataccccacagtgtgcaagaaacactgattcagattaaggctgtacaatataactatgtgagctaatgagtgactctaaatacctcgctaaggaaaagatagagcttttcgagctgatagatccaagggaaagggggttcccacctatgaaaataatctgggcgatctctcgtttcccggctctagggttattgtagggatgagcctcttgatactgatgtacttttgcagtaatctatcttcattggctacgtctttcttgctttttctttttggtctgctattttgtataagaatcgacgtgtcagattttggatgtccatcctttcttaggtgaaacctttgatgtcccctatgattgctgtcttagacatttccaccatacaatatctctcttagattacagcaaaattaactaatatgttcctaaattttgtcctacccagatagttaactaactaaccgtagtactccgtgatgtaagcaaattcctacctgcttctaggctggtgtccgcattcaacatctccaattaagatttcgtggttcatacactctatagataggcattcaaagctgactacgttggaagaaagagctattgaccatttacaggtcataattgcctctgtcatattgtagaacgacgcgccagaaaactacacatttgagtctatacttctgaatgccaagacatcattctgagtaatccccggaatatctgtgtttccgcatccatctcgcctctccgaaccacatccgctctagacctggcagattagctctatttggaccagaattcatagactgtgcgctgagctctctccgcgctcctggaatatctccagggcagtcgcaatttgagaccagtctatcactacaaatttgaccaactccaaggtcaccccggccatttcatcatctatctcttccccagcttcagtcgacaacacccagacccacacgagggaactcaaggaggaaactcactggttgtgaccgatgaccgagcggggatactcgcagcttgccttgacatatctttcagccctccctcttcccctatactcgggtaacacaatgatcaatcatacaacatgagggatcccactaccgatatggaacaaaactcacagcagacgaccaacgggtccacggcctcgcgtcgcaatccgaataaatcggtccgcgtcgcgtttggtcccgacttagagactacgattcccacccgcgaaagatctccagccccgttgagtagccatcatcgttcgctcacagcagttgaacacaagcagcccacactgacgccacacgggcgcccaaccagctcttcgggagagaacattgccatcggagagatcccacctcgccgtccatcgcctcggagatctgagagtagccgaccggctatgctgaagagagctaaaagtgattatggaccaagtcggataaccttcgataaagtggcgggcgatgacgacgaagatttcgctatgcgacatggatggcaggaggaatatacctccagtgaatatctcaagatcttgcattctgtgagaatgaccactctgatcatgagtttccggaagctaatataaatacccgctggatatagaatttctacatgtatttcaccgagaaacgccacgagaccaacggtattcccagggacccagtcgggagttggccaagccaggactggcgcatgaaagaccgcctgaaaactgtgtctgcggctttggcaatttgtctgaacatcggagtcgatcctcccgacgtggtcaagacgaacccgacatcaaagcttgaatgctgggtggatccgagttctaccacaggtggtggtcaaaacaagatcatggagcagattggcaagaagctacaggagcaatatgagactttgagtcttcggacaagatacaaacagtatctggatccatcagttgacgagaccaagaaattctgcatctcacttcgccgaaatgccaaggacgagcgagtgcttctgcattacaacggacacggagtgccgttaccaactcagtcgggtgagatctgggtcttcaacaagaattatacccagtatatccctgtcccactgtatgatctgcagtcttggctagccgggcctagtctttttgtctttgatgtttcacatgcgggcaacattgtccaaaacttccacacttttgttgagaagcatgagaaagaaaatattgaaaccaagaaacgagacccgaatgccgtccttcagaattatggtgactgtatcctcctggctgcgtgccagaagacggagtcccttccgaccaatcccgaccttcctgcagacctattcacctgttgcttgacaacaccgattgaaatcgcattgcgctttttcatcttgcagaaccctttacgcacaaacattcccattgatgacttccgagttcccggtcgcctacaagatcgccgaagccctcttggggagctgaattggatcttcactgcaattaccgatacgattgcgtggaacaccttacctcgggctttgttcaagaagctcttccgccaagatcttatggtcgccgctcttttccgcaactttttactcagcgaacgcatcatgcgcacatacaaatgccatccgatatcttcgccggaattgccagacacacatcatcaccctctatggaaaagctgggacctcgcagtcgagatggtgttatctcaactaactgctctcattgatcatgatgaaggacgccagcagtacgagtaccagcactcaacgttcttcgctgagcaactcactgcttttgaggtatatctgtcgtccggtcctacagagaagaatccaccggatcagcttcctattgtcctccaggttctcttgagtcaggcacaccgcttgcgggccttgattcttttgagcaaattcctggatctcggaccatgggctgtccaccttgcactgagcattggcatattcccttatgtcgtcaaattgctacaatcagcagctcaagaattgaaacccgttatggttttcatttgggcgagaatcatggcagtcgaccacactgtacaaaatgatctactcaaagataacggcattcactactttatctcaattctgaatccctcttcgcccattcctgtgggcaacgccagcgaacaccgggctatgtgtgctttcatagtctcaatcttctgcaaaaactaccctcagggacagaacgtctgcctttctgtcgagctgtttgattcgtgtctcaggcatctcggggatgtggaaaatcctctgctacggcagtggtcttgtctgtgtctcagtatgctctggtgcgatttccccgaagcaaagtggatgggcattcgatgtgcagctcccgctaggctctgcgagttgaatttcgaccctgtacccgaagttcgtgccgccatgcttcacgctgtgactacgttcttgggaattccagatctgactgaccaagttgcacaaatcgaggagactttagccctggcagtcttgcccatgtctgccgatgggagtgtggtcgttaggaaggagcttttagtgttcttctcaacattcgtcagacgccaccaaaacaaatttttggtcgcagcatttgaggagcttgaggaagaaaagcggtccctgtgtcatcgctgggagaacgaaaactctaagactaggcgcgccgaaggacaaactggagcattagtttctcatgcgaaacacccccagctgtctcgcaatactactttcggaactatctggaagcagttgctggctctctcggttgatcctcatcctgacatcgcccaggatgccgccgttatcgttgattacattcaccttgccttgctagaatccccaatggcgccacttactaacaaacttcagaacgagattctagaagtcacaggcttgacgaaatcccaacctcgcgagcgaactgaggtgaagaaaaccgtgccacctgcaacgcctcccttgtctggagcagcagcttcgagacaagaaggctatctttctttgggttttaggcgaactgccagcgtcgctgcttccctgaaaaaccttgcttttggcaattcgtcgccagacctatcctcagataattcaaaccccccttcgccttcaaccagccgtatgacaattaccccacgcggccgcgcccctcctgagtggacccgacccccggaaggaaatgatcatgttgctcccgcaacagcgtaccaccaggctccgattcccacatcccgagggttccaacccaagggcattgatgtcgtgcccgttattcccctaaagagtcgattcctcgactggtcgaccgaggtaattccggattttgaatcctttctctcccacaactatgattaccagcaattactcacaatttcgaagtatttccgggagccccaaatgaaacccaacgagccggatgagcccggtagctccgactataaccagcgcctctggagacgcggccgcaacgaaaagatcattgctgaaacccaacccctcaaaggaaaagctggagcaagccgatgggacaactcgatcgctttgctatcgaatggtagccagccccacaagatgtgcttccatcaatttgaggatcacattgctgtcgcagatgaccgggatacaatctcgtgggtacaacaagtcacctgttcttcattatctcctaaccattagtttcgtatagaatctgggactggcagagccacaaacgcctcaatcaattctcaaatggcaacccggtcgggtcaaagatcaacgaagttcgatacatcaatgaggacgaccaagccctgcttatgactggatcttcggacggcgtgatcaagcttttccgccattacgagactaataagaagattgaagtggtcacagcctttagagcccttcctgaactgattccaagcaatcgtaacgcaggccttgtgcttgattggcagcaaggtcagggcaaagctctagttgcaggtgatgtcaaggttatccgcgtctggaatgctgctactgaggtgtgcacaaacgtaagtattcaatgtcttgtctcgcaaatataccacgttactcacaaaagctcaatgacaggacattccggcaagatcgggctcctgcatcacatccttgacatctgaccaagtggcgggcaatatattcgttgccggtttcggtgatggtgctgtccgagtctttgatcaacggttgaagccaaccacatccatggtcaaagtttggcgcgagcacaagcaatggattacaaatgttcatatgcagcgtggcggtctacgagaattgatatcaggtggccgaaatggtgaagtccgactttgggatcttcgcatggatagcccgatctccaccatctatgctactaaagacaccctgcggaccttaagtgttcacgagcacgctcctgttttcagcgtgtacgtttcctccgccgccatattctaatgtttgttgtacgctaacataacgcaggggtacaaatcgccacgaagtcaagactttcaatgtggatggcacctatctttctacgtttgagccatactcgagcttccttcatcacaatcgatcctcgcccattgcctgcactgccttccatccccaccggactgtgcttgcctgcgccgcattgaatgaccatcatgtgaacctagtgtcctgctaattccaactcagctccgaaatccatgataccttcgtatggcaaccttcatgacgttgtttctttctcttgtcctaatattaccctttctgtaatatgcattcgcatacccgatgaacaaatctacacggcgtcttggcgattgacttgatcaaccatacattgatggctctgcgttgtttttttttgttccctcgggaatgcttcactgccctttgatattcgtgatgattcctttattcttctatttcgtgtgagacagtgtgcccagtttcgggtctatgaatttctttttccttcttttccatttttctcttcctcggtattaggcacacaatatcttgtagcaatcggcactagttgatttcctgacagaagaacgtataattgttggagtgctcgagctctgctcgctttaatgcagtaagtacagcgcaccagaggcagtcctgtcttgactgatagcctggcctggttctattcttcttctatgctttttgatgaatcgatacaatgcattagttagtattttgtgggatctagcttaggtctttatggatgtacttgatgcttggccgcgcactttaccttagtgccccacctgggcaggattagggcgtcatacgctcgctgggtggaatacgctggccgtttcttcgttaatatacttcggtgtagttgaagggttgacagccacactttgtgtttctgtttaatctcttgcatgtttccgggcttattcggccgattatgtggtctttcttcttgaattgacggtctgacgtgttgaataacctgaattttcaaatcatttagaaacaatatcaagccgttgaactgaacgcaatactacgatatctggtctgataagtttctggatatatcttctgatcatcaccctaccacatgtacaccatgcccaagggaatcacggaggaagtcttggttatatcgcatcctcccgaaaaggacattttcatttatatcatctaatgtgttgtgccaggtctgattgggaagaggcagagtgagggcaaatgtagtcacgtgtagtcatctacaagtaaaggtagtgaaaaaaagcagttagtagttttaaaagatacgtgctttgtgtatgtaacgaaaagcgatctatataattacgaagcatgagccgaaaatgtttgcaaatgtatcttcaattatttatcctgaccaacttgaattgacgatcattcgaatgcagtgagatataacaaaaaaagtagattgatattaacattgtttgatcattctcataaattactcaagctatgaagacagcctagaaaatttcatataacatcacactcatcaatcgcctagtatttgcgctcgctgtaaaccgtctcatccgcgttgactctagggtcaagcttgttcaatagatcggagctgtggggaccagaggtcttcccagtcttcgaggtttctgtgtagctgttgccaccgccggattgcccagtagtgctgtagttctggctgctagataaaggattgttcgagctgtgaccggtctgtccagtggtggtgctgctgtaattgtcgttgctagacaaagggttgctggagccgtagccagtctgtccagtggtggtgttgctagacaaggggttgctggagccgtagccagtctgtccagtggtggtgttgctagacaaggggttgctggagccgtagccagtctgtccagtggtggtgttgctagacaaggggttgctggagccgtagccagtctgtccagtggtggtgttgctagacaaggggttgctggagccgtagccagtctgtccagtggtggtgttgctagacaaggggttgctggagccgtagccagtctgtccagtggtggtgttgctagacaaggggttgctggagccgtagccagtctgtccagtggtggtgttgctagacaaggggttgctggagccgtagccagtctgtccagtggtggtgttgctagacaaggggttgctggagccgtagccagtctgtccagtggtggtgttgctagacaaggggttgctggagccgtagccagtctgtccagtggtggtgttgctagacaaggggttgctggagccgtagccagtctgtccagtggtggtgttgctagacaaggggttgctggagccgtagccagtctgtccagtggtggtgttgctagacaaggggttgctggagccgtagccagtctgtccagtggtggtgttgctagacaaggggttgctggagccgtagccagtctgtccagtggtggtgttgctagacaaggggttgctggagccgtagccagtctgtccagtggtggtgttgctagacaaggggttgctggagccgtagccagtctgtccagtcgtcgctagacaaagggttgctagagccataaccggtctgtttagcagagtggccagtggtgctgccgtatttgtcgttcgagccatagtcggtcacttcgctagaacggccagtgccgctgccaaaggtgttggtggagccccggttgtctatgtttccatgttagataaatgactctagtatgttttccaggggcaagttaaacttaccgagatcgctatcgacacggggatcggccttgttggctagcttagagtcatggggaccagcattgatcttactggagccggtgttggatgagccatatccgccagcagtgtttgatccgtagttctcggacgttcctgggccgacatcaattggacccttgcgggaatcatggatagtgccagtgccagtgccagtgccactaccgtgacctccagcaccggttgtggatgaggtctcatagccggggccagagccagagccataggtgttggagcctgcgccggtagaagtgtttctattaaaagtattgtccgtagtcctgtccgaggatccgtaagtatcccgggtatctatgttaatagaataattagcatcacactgcaatggttttttttctaggaacaacgaaccatcagtcttgctgctggatgtcttcgactcatcatgatgatgaccggtcacggcatccttgactttgtgaatgatgttcgacatgatagtagtgttttgatagtaaggtgaaagatttggaaggagttgtagttggaagtctgactattgttcgagtcagatgattgtttgtttaaggaagaagtggaagataatgtgcttccatagccggtttatataccctattgtctttgcgtgtcttgaccagctcatgagttgatccctacttgtggagactgagtgacgccataacgcgggggctccacgagtataatcaccggtgaaacatggagaactccttcactgccttgtttacaactgtcatgacgtcccaaacaaactttacacatacagactcatagtcttggctgaaaatgcgagctatcttaatgtcattcatcgtcatgtcccggatcttcaagaccaacacgccactgagccaagtcttacaaggatatgctgtcgatctactcgccgactgagatttcatttcgagtgggttttccagactttcgtgccaataattctctgagtttgacattgctatatcgtggaccatggaagcttagctctgagcttatcttgtgtctttataagaagagtctagggtgttattattagtctcttatagacataataaacgtatcgaaggcagacgaagagattctcgaaagattcctgcaatatccactagtcccctttagtatatacacgtcatatgaggggttacataatttcccacgctaatccagatatggcaagtggggacaagctttatcgatcgtcaagtccaaaaatatctgacgggtgtgccttgaacttgttttaacattggacatagagtatactagctgattcgatcggatactacaacatacagtctatgatgttgcacacattcatagcgctgcttcaaatcaaaactggaaaagggggtggcttatggagttgcctagcagtgcccagccctggaggtgatggcatgatcggcgtagctcgagaaccttggaagcgatatcaaatcgactcggtacggagtatatcaaatctacaatacgtgtctgttattgcgagatccaaatgagggggcaaaaacgcaccatgccatcttgctaatatattgtgacattgtacgagttacagcatttgtcgatttctctcacaatacttgttggagtcttcttttcacatattaagcgcctgatgctataaatgagcggaggatatgcaagtcgttagctgagccagtatagcaccaaggtctaatagttacatattctacatagtgactcggtatctgatttaaggtcgtgtggtttgaggcaccaaggccaataaatgccttaggcttccaacacatgacacggcggacatgccgtcacttacccggggttagataatccacatcatgagttcatttccccttctccacctgacttcacttgaactcccctcctgtctatctgactccttgttcggtttggcttccctacactcgcgttggctgtcatctgtcgtctttcttcaaccagccatagtgctgcccattgtactcgatgagtggccgcctgctagcttgccgccaactgttggattggtcataaaagagtccacccaaagtactgtggtacagcggagccgctggcatcgtcaatcattcacttgatccaccccattttgcagtgattagatatctccgattaagccactctacggtagaagaggctaaacccatctatcagagacatgcgaccgccacgcctgctcatcgtactcttctgccttatcttcttcccgatcctcctcaccttcttttccgcgcttacatcacccgatgtagctcctaatactctcgctggtcagaaaactgggctgcgagctttgttttcttttaacataccatcgtccctttttcccccgtcggctattatcagtctcaccgatgacaactcgaccttctttctcgcccgaccagcggcatttggctccctactgccaaccaaaggccttagcggtcagctatgggtgggaagtggctttggtgaggggggattagctggtggtgtggaaggagaactgggctgctccgatatccccggctggggtgagagcaaaaatcataagaaacaagataaaacctctagagccgcggagcagagttccgggatctccgggggaagtacagtgaatgatcaatcctcaaaccgcccgcggtcggtgtcgcaggtcgatactacgcagaacgatagagattcaactaccccgcctttgacgaacgatggcactgacgaccatctacaccatccactccctgaatctggttcttctaaccccgggatgaatcagaaatatggagattacgtccaaaataagccgcctgcgcatgccgacatccaatcgctacaggaaactgccgaaatccagggtaaagtagtgctgttgagtcggggtggctgtgggtttttggagaaggccaaatgggcacaacgacgaggagggattgctttgatcgtcggcgatgatacccggggtggcaacttggtcactatgtacgcacgaggcgatacatcgaacgtcacgatcccggccttgttcacatctcacactactgctcatcttctatcgtcattggttcctgggcatacaggtggaactgccggtctagaagatgtagtaaaatcatcacaagcgaagctggcaggacaagctgaagccgataaagaacgggtggcaactactaccgcaacaacaacttttcctagtccgactgccagcagccattcgacaaccaaggagaaacctgcaccctcttctcactcggaaggcgggtttttccgtgcaattggtgcattcttgggattgtgcgataagaacggaggttcgcggcgtctagaagacagccgacgtccgcctagcagcggcaacattgattggatcaacctaggctcacggaatgaaaaagaagccccgtcgagcgcttggaggagatcaacagatctcaatcatcatggtcgggccaaggtagacgacacattcgacaagcacaaggccgacatgtccactgaaggtcttgaggatgatgactttgtcatcggggttcaggactggagagatcctgacttgatgccccctaagagtagcacccatccgacaactagcatccctgcaactggcaaggatacctccaagactgccagtgcggataaagatgcctcttcctcgcccaacggtcttcagggtggtagcatcacaccaggaagtggagaataccagagcttcgagaaatccagtgctggttctcatgacacgcaccgcaaggggtctgagaaagaaaccatcggaactcatgggaagtccagatcttcttccacgaagggctggttctcgagtcactttggatggggagatgatactcagcaagaccctcagccttcttcgtcgccttcactccagaaaagtattgcaaccaacgagcagaaacaaaacaacgctcccacatcaagccgtctcagcgcggagtcttccgaacacgaaggtctttgggttacaatgacacctaccagcatgtccaccagcccctttttcgatactctattggtacttgtcgtcagccctttgctcacactgacggtggtttatgcccttttgctgatccggtctcgaatccgccgtcgtcgctggcgtgccccgaagtcggttatcgaacgacttcctgtccgaacctaccacacaattgccaccacttcgtcctcgtcttccaactcaacgcgcccctccagtcccagtcctctatccccgacttctccactccttggcacagatagccgaccaagcgcatcccgatccaatagatcacgttcacaaacattctcgggcactatactagactcatctgtcgtacccaaagaagagaagtgcaacctgcaaggtggatctaccttgtggcgacggaagtacacaggaaggcaggtggagtgtgtcgtatgtcttgaggaatacatcgatggtcagagccgggtcatgagtttgccatgtggccatgaattccatgtggaatgcatgtaagtgacgtgaatttttttgtcttggttgcgaagttttactaacctcttttctcagtaccccctggttgaccactcgtcgacgaacttgtccaatctgtaagggcgatgttgtccgttcgttggctcattgtcaatccggcgattctcggggtcatcgtgagcagtctcttgatgatgttcgcagcgtccagtcaatctctagaggcagcgcatcttccgctccagtaccaattgagggcgtcaatgacgatgcttcagatacggaacaaaatgcaggtctacctggcgaccatgcaaattctgccccacagtcaagctggcgaaacctcgctacccttagcttttctgctctgagtggcgacaccatatggcaccaggctcgcgcagaccgcaatcgctaacatctatattctatccactcttttcgattttcattaaaacattcccccctctgtcctgtggaatttgctctccttgtattgaagcatgctgtattagcggtcgtttggagtttcttatgatttggatctgcttggcgtttggtgagaacagttcggcttgctgggcggttgcaaagtggctgcaaggattgttgaagcggctggaatataccgcaggtcagtcgttcaaatcgtgtacgttcttatgttcttttggtagaatgggtgtttgaatggatttcattgacacttggctgtcataatactattgctatgctaccatcctctagtttattgacactgaataatcgcctaccaacatggcctccgcagctgcacttgtttgtaatttatagtaatcgaagctgctcaaaccacacctcgattcaatgactcagaccaaacgctcaacctcattccttctcaacatagacattcctagcaatatccccaaacacatcaagtgtatgaaccagtcgatcacgcgccaattcaaggcgaggaatcatatcccgacccaaaggcaagaaccactcactctcacgtccagcacccacgccctcaccaacgatgacttcatacatcgccttcacagccttatccgtatcgccatcagggacaaaattaccagtctgtaaaacatccagcgtctgcgcaaccacagagccgacatagtcgaccggtaaaggctcagcgggggaacgacaaccagccccgaactgcgtgttgaacgctcccagccataccgtcaggacacggacgttaaagggcgcgacttctttagcgagggctttacataaacctgcggaacatacacatcaacacataaacgagacatccctcggcagaagaaagagaaaaaggagaactgtaccatccatagcagccttcgccgacgcataagcacccatactctctctcccttccactccagccccagagctgacattaacaacaaccccaaaccgtctttctctcatcccaggcacaatcgctctgatcagccgatttggtccaaaatacacagtctccatctgggcccgcagctccttgtccgagaactgctccactgccccgaggatcgcgtatccggcgttgttgaccaacacgtcgatcttgtgtgtagactcgagcttggataccagctcagaagcggcggttgggctgtcaacgtctagtgtgtgccattcgcccccgttttgggttatctccgatactatctccggggtgcgagagggttgtcgtgatgttgcaagtactttgtggccgtttgattgggcggcgcgtgccagtgcgaggcccaggcccgaggagcagccggttataagccagactagcgggcggttgggtttggtgaatgttggtgcttctgtggccatggtggtttgtgacaggtgttggatgatggtggtaaagatttgactgttgtgatgttgatttgcgataaacttatgattacagtgtcataatatcagaatagcatgtctcttatatcgttctattactgcgtgcctcggacttagggcggagttaatatggtatgtcagcattggggcttccatttcgaggatttaaggtggaaaaaggacttaagctggcgtccggcggttgacaaaggtcatcatcggcttgatctgatatccaagctacctcacatccacaaggttgtaaatgaagttgtcataatttctacagagtgactccaatataaacatgcaagccaaatacatacaaaaagaaatcacagaaaaaaaaagagaaaagcagcccatcaccccggaaaaaaacaaaagtcaatgccaagttcaacaagatcccggcacacacgacaagctacaagcgaaccgccggaacggtaaaggccgaagcatctcattcggacagcggggcatcttcattccattctcgaacggtatcaagtcccaccactccatccattcagcacggggaatcacgtactcccgctggcatacggagcaggactttccaccagcagcacgcacttccctcgcttgttgcagcaagggcacaatcagcgccggatactcggccagctcttcatcggtggtttgctccaggtaaggaagcttgctcacagcacggagcgcgacttcacggagggatggggcgtcgtttacaggagatgccaatcctggtgtgagagtgagtctgttgctggatgggctgtctcccataggattgccctccatgtccatgtaggtgatcgtgcctgttgcgaggtggagaggaccccacctctcggtgtgcgattggaccgcaggagacaagtcctcgtggttctctttttctttgttgttgtagtgccgttctgcgatcttcgctttgtcgtatgtgaggaatgggttcgggcgtacggtcaagtgtttcagttcgccttgctggatgagtttgagaacctcccagggaaggtaggtcaactgattgacggaaaggttcaaaacttccagtgctgtcagtttgcagattgtagatgggatttcggccagcttgttgtttcgcaggctgaggactttaaggttgctaagctcgaagagatctttgtgcagggttgatagagagttgttggggagatatatgctgaggaatggctgcagagacgtgaagacgttctctgagaccggggctttcttgactgatggaagcttcgtcaagtgctgtaggggtagtaggagaccgggtggtatagttcccaaattgaattcactgcataggacaaagctattaggatcattggcatgggtgaaaagggacatcagatgaaatggcattagcacataccccaggtcaatgctttcatgtcctttatcaagacaatcaccgataacctcccgggcaaaccgatgaggatcggattcctcgggacttttgaatgcaatgcgagtctgtgaagacatgttctctgtctcaatactgacaggtatagagcttccaggttttctaggatcaagcacagacttgcgcaagtcttccccccacgccgagccatcctccgacggcaaaagcgactcagcaaccgactcatcactccccatccacacaccactatcaacattcctcttatccttaaagtctgcccttttccgcttcggatccagcacctgctccccccaccaggtccctcgataccgccgtttccgtcccgcgcccgatactggcgcatggtagttctccagcccggaagccgggatatcgtcacttgagaaaagcgcaggatcactggatggctgactagagtggtcgtcgaagcgtgatagtcgctgtgcgcgctggaacgagaccgctgcgcctgtcgctgggggattcttcacgggtgagcggtgccggactcgccgcgacggtgggagggggatctcgctgtccattgcgatctcagttcgcggattcagacgagtctcttatagttctctgcctagatcattgggtttctattccaacacggtttcgatctgatgttcggagttgcgcgacgcgttgtggtccttgtggagacccgcgatggagacctgcgggtgtcaacaaacgcgctaatggatggcgcgattgggagagataaggggataggatcgactggaatcaattgagaggcatcttatattttggaagaaaaccagcttcccggttggaatggaagaagatcagatcaagagataagatcacagcacacgtgcacgggcatatcagttgaccccggagctcacggcttccccactggaatgtcggatcgacacgatcttctctatctttctaccacgtcgctgctattggtgtttatagttggaattggcatcaaaggggaagaagaaaggtgtctatattctgtggatgactcaaactcgactcatgcaagtcctggatatcagccagaccagtctgacaactagcaggtcacccatgacaacgtatatggacaaaagaattgaatcaacagggtttgaagaagagaataataacagcatcaactcatatcggtccaaaaagtcataatgaagtgaaaaaaatggggtatttgaaaaaagcgttaagccatttcctctctgaaaacgggttcttcagctgaccgagaggaatagaaatgttaaagtgtaagaagaaaaaagaagaagatcccggctctgctagagataaacggcaatcaacaaggcagcaagtcatgcagtatgaactgggcgcagtatggcagtggctccaattcatgatcgttgcctgcatgaaggcttcttgccgagaaggcgcgattgtaattacaaggcttggcccaccatcacaacgatatagccagcgacggccaaggcagctggcatgccggcgccaatgttggccgctgcgccgatggaggtggcggctggaacagcagaagtagtggaggccacacgagagaggggagtcgacgtcgaaacagacatggtgctcaggtatctcgcgctggaacttgggctgggacttgggctaggatttgcgatggtactcgccatggtacccgcgacggaagtcgtgatggaagtcgtgatgggagtaggagttggggtcaccgaattgacgcgaaccagagtcttagtaacggtcgtggttgcagtcgaggtaatggtctcctctgcggcgacgaatggagccgcaactaggcaaagggaggcgacgatggtggtgaacttcattttgcgaattgattcgaaggtagatatcaatacggaagagggagcaaagcgattgaattggatttaagattggtgaagcgttgatatggcgccaagatgagaatagatgtttcaaatttgatcgcaaaagagtgagcgtcaaaagagagattcaataaagatcgtgtggagcgctgctcagacagtataaaagggtgactgaaacgagtgtatataagagaaatctctgcgtctagggaaaaagggaaaaaaaaaggaaatttagggcatggccggggctaaataaagtctcgaacctggggaaaagagccattcagtcaaagaagtcttgtggcgcttctgttttggtcttgtatttgctctcttgtattattgtttgatttgcaagtgaaacataaccttcctattggtccattgaacacgaccctggaagattgggctccattcagaccgaactataacatctgaagccctaaataccaaagggttttccgcacagactctacaacaaagacgccaggggtaaagtctgtgattatcgtatgaagagtagttaaatgccatagttgggcttatttacatctgttgctcgtaatttcaaactgtgtcccttggtgcagcaaacacgagaattcttcgcctcgtactccgtatactccggtgtaattacgccacttcctatgttcagaactgtttccagtggcgcctttgcttattttgcttactttgttgttttgctgttttattacccctagagtgatagttagaatgacgattctcgctggacatcacatgctactgcaagtgttcactccctcgcgggcacttccgtcttttccggacccctggcgtcatgcgcaggaagaacaatcttagacataacaataacagacagtttatggaggaattgacttgggtcctgatctgacatcttacctgccttaaaatggttccggtggttcgccccaatactgaaatttaccgcaatttgcccggttcccacactatttagaaagaaactttttgtgttatacatacggagtactatttcctatgttaaaggctctgtagatcgtttccgtggttctattcaggaacgaaaaacgatcgtcgctcgggcctactgtgttgggaatctcgactccgtggcgtagagtctggggaggaggtgagtcattcgatgctcactcattcgtgttcttagccttacaacatataactacattggcacatggtgttatgtgttggcaccatgtcattataagaggtgtctttttcaggggctctggcctcattgggctcgccaagccctatgtcctccacttagaatacaacgacaaatcctaaggctactacggagtatactctgtcgtgtcgatcgacttaaaatttgaagatgatcattatccactccattgtccgtactcatccgtctagggtcatttggacaggaaaaaaaagggaagggggaaaggggttcgctcttttccttctcatgtttagcgctcaatcttattttttgttcaataagattgcacaaagtagttggttcaaattagaggcactcaaatcctacacatgataggttaaatagtctctttttagctttggttgtaaatcggtgctttggaaatagcgttgagaccaatactgtcatggttagatgaaatatatatcagtacccattaccagttcattggtccttaaaatacgatcattttcgctgcaacagagcccgatatcaatcaaagttgtctctagacactaggttcctctgggagaactcggagaactcgtggccattgacatttggtctttgatgtgcgatgattctacgtcgtagacctctaggtaaagactgtattgtatgtagtatcgaaagtaaagaccaagcatgtcagaattgtcaatcacatttgcactcgctcatttcccaactatttccccattcttgtcatcttcaatcattccagttctctcgcttacaacgcaggcttctcatttttgatgtccccgaactgattccgccagaggttctgatatcttccaccctccttcttcagcagctcttggtgagacccgctctcgacaacctgtccctcatgcacaacaaggatccggtcggcgctggaaatagttgaaagtcgatgggcaatgacaaacgtagttcgcttggctctcaatcggcccaacgcagtctggatgtccgattccgtgctcgagtctacggcactcgttgcttcatccagcaggagaatcggtgacttctttaggaaaacccgagcaatggccatccgctgtagttcaccgccagacaacttgacaccctgctctccgactgtggtgttgtatccgtccacaaatgtgaggattttttcgtgaatagctgcggcacgacatgcttcgtggatctcttcatccgaagccgagggccgggcataccgcaaattctcgatgatagatgcgttgaataagacgggatcttgtggcacaacaccgatagtctgacgtagtgagctgaggcttatgtcgcggatgtcttggccgtcaatatcaatatgaccagcagtaacatcgtaaagtcggagaaggagtctaaggattgttgtctttcctgaaccagtcataccgaccagtgcaactgttgtcccaggttcgatagagatattcacatccttgagagtcttcaaccgggaatcataggcaaagtcaacatggtggaacgaaacacggccatcaccaggcttcagcggcatcgcacactccttgtcagtgacgctaggcttggattgaaacaggaagagtagccgctccgcatcaactagatcagagacaagccagcgatattgcgcggagaggtaggccaaaggagagatgagcgaagaccaatactgaatgaagaaaacaaagtctcccgtggaggcgcgtcccacagaaatctcatgtacgatgagcgaggagagaccaacgaagcaaattggtttgagtaagtccaggagtgatctgcctattgctcggcgttgaccgaaacgggcgctagccttcaaggcgaggtcaaccgcttccgcaaagcgagacctctcgtacgaaaactggttgaagtatgtaacagtctgccagccttgtacggcctgatgcataatccgagtttcgtttcgctgtgtctgtgaaacatcacgtctagcgtcgatgttccagttagaggtaaagacttccgtcgcaacataagcaatagatactatcaccaccagcaaggacgcgtagatattgaactttaaatagaaaacaacacatgcaatagccaagtcaatcactgtcgggatgatttctagaatggcaacttctaacagactgttcagcgctccgccttggtcgatggacttcataacttctgccgagtcattttcgatatggaagtccattgacagattcatgacatggctgaaggcagcagcagtgatctgccggtaagagaactgcctgataggaatcttgacaagtgcctcgatcaatcctagcccagctccgccactgatgagctgcagcagcgcccattttcccagtgaagcatatggggttttgttggcaaagatgctatcggtgacatctgctagttgctgaggaatgaggatgttcagagcccggtggcatactaaacagaagatactggtggcaacacaaagctggaccttgcgattatttctggggaccaagtatggcagaaatatcgagaagcttttcagatattccaaccaacccttaaatgactgcaacttgtcattgcggagtcttttcctgcgcatggctgcatcattcttattcttgccggtgtccgaatcgctctcgctcttggagtccacgctgctattttccgagtcgttgccattcgctgcgccatatcttgtatgattgccatttaggaaagggcgcgactcttccgatatctttttcttcctctgtctagtctcaaatagaatcgcacttgccacaaagacaagcagggcaagtcggaccgctgagatggtgagctgcgtgattggcacccactgtctcggcttgggacacaaagagagcgcaaggagtggaatttcgaaaccagcggtgaccaacgagcttccagccacttcgtacttggaaggattctgtcgcagccacagtgccgtccatatgaccgcttgagaggtcatatgcaccaagaatggctgagaactgtccaggtcatcagtgatgattttcaaggccgtttgactgacatatgtgaaaacgatcaagctagccaagataactcgaggtcgactgcggcgcttggagcgagtctttcttctctttaccggagtgcgataaaataaaatgcatattacaatgtagagacttgctatcaaagtacagctataatgaaggggagatgctagctgagtagccatgatgggaggtgggacggaggttctgggtaaaacctctctagcagggtactagcagaggtggttctttatatattcccccattctgagcctcattcctataccaaagacccgttattaactgagcgactgcttattggatagacgcactgatcatgtcaaaggtgcctcctgcgccaggggctgggagaagggtgtcctagcggctatccaaactaaaccgggctgtagacttaggccgaggcggcaaaatggcttcattattggttggaccatgcagatcagactggaatttacctggctacaccgtaagttgatgctcttagttggcagacatgccttactacttactttgtactccgtgcagtggacatctaaggggctgactatgtttcggtgacttgttcgaggataagtaataagggaataatcctgttcctaattatcacactgtgatataggttctattctcaaactgcgaccgtgaccgtacttcgccttcgttgtctgtactttgatattgatcttcacctactctctataaagaaagttccatataacatgacattctacttaccgttaccgcgtacctgcacatgtcaaggcaaacagtacggtccctaactggaataatctaggattaaatctctaaatccccgagagcggctggaacagcaatctaacatccgtctgcatctggtttcaggatcagacaaacggaaacaaacagaactgaatcgctggtacagctgcctgttagctacttgtaggtagagatggctcctcttaaagggggtttctatagtttggtggctatgatcaagacaagacggttatagccttacatactgcctagcctgggcatcaagccacgtcttgagacaaaatagatgccagtccagtcaaataatatgacggttggctgtggttttactaaaagattgacaatcaacgtggtcgtattcagaaccaaccagatttcttgccctgactttggacttaatcaacaagggtagccagactagcccatacatagaatctttgacctcgtagattgatcccccgcccctttgagctggattctcacatcattggaccgtccccacacagaatcacagaggaattttctttccaaggacaggattgaatcgtgtaaaagagaaaaaaaaaaggatatattatcacgacaacgcctcacatggaacaactgagacaattgaacttcaacattcatgttctgggtactgctagattatgtacatcgcgtgtttaagtagcgagtacccatgaacttgtcgtcacagccatatttgggtagttgtcctgtctcgaaaccaccagaaaaagtatctcttaaccatagagattatatcgtacaagggacgtcgccaaggagtggtcatgtcgcatgtttcccgaacatagccataagactgcgagaaaaactgtgttcactggcgcattggccggaggggactctgtcgggggagcatcattggggggccccgagcacgaagccaggcatcgttgtgaggtccttcagagcggatgacgctaccgatggacatgaagagtctatttgaagggaagttgattagccagtgattctcaaccaaagtagtataacttcaaagctttcaaggagtcaaccatacccgaaagtggcgcctgaacctagcatatacttgccgagagtccgcataacaccgttggggccagcgccatattggaagatcgtcacagttcctgtttcagttagcttatcatgcacaccttcattcggggactaagtgggaccaaccaataatgaagcccatgataccaccaacagctgaaaggggagctatgttagcaaaagctcttggtgaacaaggctcggttgttttgtgatcacgtactggaacccatcaggcagcccattttcactaggaatatgtcagcatacttggttcaccatatatatatagtacccaaggaaaaaggacaccacgcggagggtgatctatatcactaggttgtagatgacatactcttctccaaagttgagggagcaccccctgggcccgcttgagcgggaggtccggcaaccacaggcattatggaaagctaaaaagaagcttgtgaattagattaaaaacagcatgcaacagcgctgagccgaatgaaagatctcgttgtgagagtcaaggaacaagctctttttcctccccggcttgatgcttctccgccttcgtcacgtgagtccctaacgggcttgaaatcgcacacgtgccggtatagcacgtgacccattttgcctgtcggcggcatcaagggcgtaggaaacaaatggcactcttgcgctcttgcgtgggttccctcatggcaactatcctcggtctctgatttctttttcgccacgtcttttaaagggctgcctgaagcctgcgccgaggcggcagtcccgtcttgtgcttatatcattgccctggcgtgagcccggtcgctcacgatttccgacctccacacaactccttggtcttgaagcacctattttattccctcctaaatatctctcagttcacaattctaaagtgagtccacttcttactccaaatacacaactattttttgtggggtcgaggcaagacctcgacctaggagtcaatctatttgtctctccctaaacagcactaacgcgaccgtcttgactttagtcgggcgacccaagtttcaatcacccttgcgcgcattcaatatcaccaacccccgggcataaaccaacattactagacgtcctctttttactcttgagacctcctcagaagacggcctacggccccttttacagttcgcaaccgtggacgcgctccgtgctccgtctagatattccattcccttgaaccattcgcatccttctctatgactgccgtggcatctccacctagtgtcgaatcggggtctcgcttgggatggtacagctctagtaacggaggagaaggagctctgtcttcagcgaatgcggacgacgtgtcacggatgttcatgccacggaaacacattcaacgctcaaactcctcgtcctctctagggtcgaactcttcggtctcctccgcatctactgtgaccaccccttcccaagatacccatgccgcgcagaattcggccagtgaatcagagacttggtcgtcatcaaaaaagaagtattcgaaaaatatctggcctagctcgaaatccgagccggtatcaggggtgacaaacgcgcgatctcaggcggtgcctgcgttctcgtcgggcccaagtgcgtcgtcgacaatgtccgcaatgcaccagcctctaaacatcgtcccatcgcaacagatgccccagtcatcgcagcagaatggcgtccgtgcgccaaccggcccaccctcggagaatctagcaattttgattcttttgccgatgaacggcacttttgacaggaaacagatcaatgtaccatattatcccgacgtcctacgaatcgggcgccaaacaaatgccaagacggtgcctacgcctctcaatggtttctttgactccaaagttctctctcgacagcatgctgaggtatgggccgataaatctggcaaaatctggatccgagacgtcaaatcttcaaacgggacatttgtgaacggtcaccgactgtctcccgaaaatcgggagtcagagccgcacgaactgcgagaaagcgataccctagagctgggtattgacattgtcagcgaagatcaatccaccatcgttcatcacaaagtctcatctaaggttgagcatgccggaacttatggcactactcctagtatccttgatctgaactttggggacttggatcctgcctcggggggaggccttcttccttctcccttgagccaaccgctttctcatacgcgcggtagagccggtagcaacgcgagtagcagaattgcccagagtgttgccagcaatcagctcaatgctttgcatcaacaacggcagatgaactactggaattccccaatctctatcgaacaggttgtcaagcggcttacggtgtgtatcacaatttatctgtatactacatatcactgattttttccagggcgaactgaaatccgcaaagcaacagacaacagatctttctcaagcagatgaatttttgacgacgatcatgaaaccaggctatgcagagaaagaaaagctcattaagccttctcctttggagaacagttctcatcgccagatgaatggtcggcccaaaatgcctcgagtcgactccttctccagattctcggatcctcctgcccctccacctcaacagcctctgccggagaaacccgacgcgttgtcacgaagtacatcagagccgttctcaccgctgaagcgcagcgatacagaaaaaccgaagagtggtacaggttctcctgtctcccgcgattctagtcagatattgaatctcatcgaggcgctatcttctgccaagcgagagattgaaacccatggaacacgtgtcaaggaactagaaaatttgctgttccaagagcaggctgctcgtaaattggcagaagacaaagtcaatgaattggagatgcgctcattggatgttgaagtcaaagtcgaaaacggcattgttccacctccagagaatggcgtagacagaaagggggaacaggacgatccagaagcaaccgtacaggttaacggcacccatccttcggagactcccgctcccgacaacagccaggcagacgctcctgtggaagacaagactgctgaacttcagactcgcttggaaataatgatggaggagatggcagagatgagaaagcaaatggcattctttaaagatcgagccgagaaggctgaagatgagaccacggagtctcgcaagtcgttgaacgaaatgattgaaaccttgcgccaggaacgcgccgagaaggcatcagccacggcgcttgacaagaaaaccgatacgcatgattgcgagccaagcaatgggttagcagaacagtcgcttacgagcgatgatattccaacggattccaagacgaagactccatcgatgcagggctccgattcggtcacctcgcaaaataaggacatggatgctgcaaccgcagccacagcctttgcaacacaacgccatcgatacaactatgtacaagaagcaagtccttacgcttctatgtttggcgtggtcttattgggagtaggcctgatggcctatctcaacagttggcaaaagatcgacaaataaaccagcctggcctcgctttcctatccctttgacggctatttctattgcataggccctttgcataatttgactttgtcttctatctttttcagtctttgccagtcacgactttctggcgatgaatgtgctgattcttgtctcgcttgaggaccatcttcttgtcttcatattcggagcatattccctttagcccacactgtctcttttatctcacgaattttttgatgactttctcgagatccctcttgggaatctccttcttggtcgtcttctccgacgtccgttcctccccctctgtcttgccatctcctttttcttcgttcttcttctacctcctaccatgttactattagcctgtcacccttttataggtcgacatctctctttctcttttgtctgtacatgataggaaaagcaggatacattccttgcagcctctctttgaaacgtttcgttcgacaaagggttttcaggcattatcattcatcatgtcatgtcagcacagggctttgtgagcgtatcaaggagttcttattcgtactatgtcgttttctattcatgccatttgttattcgctggcagattcgatcattctccctcttttaacctcttttcttattggagtagtaccttcaacctatagtcctatctccctctctttcattttccatataagtccgtccagcatatacagtgcgtcaagtcggttggatggagcatgcgctctggggaaatcagagtttatttctgaagtatactctcaatgtacatgattttgcgctaggcttataacctaagggcaaacaaattgttccttgactgatcctgatcaagggccttccgcacctgtaatgtggatattgcacctgtagagcggtgagggtggtaaaaaaaggcttgagggctcgactgcatcccagaacaggaattcaggataaaaatctcctgaactgggttactgggtggtgtatagtcaccatcagcgttccatttggatcgtagtcactcagcaggatgtgcgtgtactcaatgttctagcgggtaattctgggcttggccacaggctcatagttggttcgcagcaatgggtgtgaagccttggagttgaacatccagcagatgatggtcgtgcaatcggatgaccgactaatcgtaggagttttgtcggggtgaccgcaagcgaattcacttaaggctgacggcgacttcaaccattttgatccaccttatccggctctcggggagctcggcatcatcctctaccgcggcagcctgacgtttcctcttctttgcggctgacttggattccggcttagaagccgcatctccctggtcagttggggtttgctcttgctgccgttgccgtttctgttcttcttttgctttaatttcttcgtcctcgacgatatcatccacgacaaccacgctccccgtattgacacagactgtgtactcggtttccttttcctcgaaccatttggctacgttcagcgccttctcaatagcccgccctgtcgccttcacaaaaactttctctcgcttctctggtatcttcgacaactcctcgagtatctgtttatcgttcttgcgcgtatcctcgagattgatgtttgctgtggcgcgcttctcggcctgcagcaggagtttctggacgcgcttgacggcgctcatgaatggcgtagtcttagacacatagacaatcttaggtactaatgcgccagcatatggggatgcgactggggcatgaggtataggacgcttctcgactttggcatctgttatccaaaagtcagcagttgtgatccccggttctcagcattggccgtttaggcgatcggatgggaaggcgcacgttttgggagtctaataaggtctttgttctttttctcaaactggagcttgttttccaatagcccctttgccatggctaatatatgccttgcacgaatgaaaatttgcaaaatcaagtcgaagtattagagctgcacgtcttatcgtctgcctttttctgccggccgcccagggtgtgtgatctgcttatgtcatcgcctgttgaacctgcctaattgggaattgggaagctacaactaggtatttctccaaagtagatcggcaaactgtatgatacctaattaggtagcaccttctcactaatttgatatcagtagcctgatcatccacataattatgtagctctatgcacttgttgatgtacttgagtgtaaaggagaaaacctagcgattcgcttcggaaggcccgcggtgtgctgcagaccggtgatgttccgtatactttctactttcgattgaaagggaagtaaggttgacttgaaagcctactccacattcctgagccgcattaaagacgttggcttaagttatgtacatactgtactcaactgttaccatgatccaaacgccccgactcctgtcaggttcttttttcactaagctagcaggcctactgtccagcactgggcccgggtatggggtcattgagcaatactttgtgtttggcagggtggacctaagtacggagtacaggcatggtcatctatttgggtgggccagaagtccttttgatcggatggagttttcaggtgccggaacacgccttatcgcctagtaatacctacaccggcttgttgcgtttcggagagaagatattagctcataaccacactccgtaattcaagagactagtgggcagtggactgcagatctcgaacggcgatgagcagtgtgatctttgttatgattctgaatggggcttctaaccaggtgatcctggtctctcggtttatgtgactatccgtatggagcacacgcatcgagaatgctcagtcaaggcctattcagattaagggcgattgatgtgtaaaggggtactttttcccactccggactccgtcctatatagtttaaagtggagaacatcgatatgaacaggcagttccttctatattgtagatacccaaggggccgcttgggcatctcgtccaatatttaaggaatggctttgataggtgttccgtacattctagttgatcaaagcaccgttgcggcatcttatgtatgtaggtatcgaggcaaagagggtccaaagtgtctgttgacccgagtattcggtagctggttctcgcaatatccatatcttggacggagtaaggagtagggtacggagcactccgtactccatatagagtacaataagggcgatcaccacgtgagcccccgatggtctggcaaattttcccctgaggctggtcaacatatggagtacggattacggtataacatcgaatgtgaaccaaggcgttgacgatcaacacatctaggcttgatggatcgacatacacctcgagctgaaagctgggcagtgatgtacaccaaactagtttgggaaggtcgccaaattggcgggctggtgggtcaactgggcagtgttaatttgtttcgcctgtttcaatgatgaaagttagatcatgtgcatatttgatgtttgatcttcacttttaagaatcccaagtatcaaattgagttgatgtagcaaatcctgaaggttggaaagtggacctacggagtatcatcggcgaacaaaaaacgccttagactagtatgccttaggcacttactgacagtagtatcgtagtcaggttactgtggaagaccataggtaatgtctattaactccggctgtctgcagatgaatgattgacttaaaagcactgaggatattctagctcttgtatatataaaatttgctttatcccatgtgactgctccaacggctcctttttcgagtgcccaatgcaacggtcacaagtgggttcatcaccagggatatatatgaacacaatatagaagttgcaggtatacatactccatattgtgtatgtactatatccaggggcccataggcgatcgaagccaacacaatcgtaactgttcatcggatctacgtattatgaattgaagggttgaaaatagatagggcgacaggatggttcatgctgtactataataataatggacactcatgggtacagagaaaaaaatagtctgtgtatgttgtttttagattttcacaaaggtacgtggccaacatgagccacaatctggaaagatctgcttgcagtgcatggtagacataagctgagggtaatacatagctgacacggaggcaaatttccgagaaatcgcctcttctaaactgacctgtcgccttctgcataaagaacattacactgcactggtgaatatgacagagccaaaatatttggtaggcgtaacggctcccccagttcccggtcacaacgttagggttccgcgtgcactggagccttaaatgcaagacagcactagtcgtctccggaaaggcacgggggatgataatccaatcataaatgtgagctaggctctttggcttggaacctacctgaagaggaaaggtgttcaacgtaggctagtggggtcaacggctgtctctgaagcattccacgccaatggtaaaccataggaatcggagctaatgacatgttccagcgggtcggtgcaggtggagtagctttaaaaaaacagaatccatggatctggactcggatagggaggggtttgtcttagttaaattgattaaattatgggtttcattgatttaaacaaagaaaaataataaataaaaataaatcacacgcaaagaaaaaagaaaaacaatttaaatgattaatgtaaataaataaaaaaatcaataaatcatttaaacaatttggatttccagattttgattctcgcggacttttgcgctcgagtgcgtctccaccttgtagaatggtccagccaaagggcagcagctcgcgcctttttgtatgggactgttcccctccaccgaactattttgaactcttcctcctcaactctccttgacttccctctacattcacttggtctcatattcccagccactttggtcctttctctgtttaacgttctctactcgatccttgaagggagttaagacgtgtctcacgtttcagccggaagctagccattgaagccgctttcttgcgtttttttgcatacatcagatctggcgtgcaggagatccaacagatcccgtgtcgtgattggtttatttctcaagggatatcctagagacaaaagtactcgctagtcgcaaaagctttttctttctttgttggcctccttgtaccccagggctgatccgaccaaccgggtcccctccatcagtcttctattcctctttgggcctatcaggtctccagctaccccttgacggcctttgagctatcccagccgctacgactcataaatatcgctcttttggccactggactcgcattcgtttcttctctcttcctatcttatccctaaaacactttttcttgtcccgacaccagtccttcaaaatattcatagcatgtctccagacccttactatgagacattggatgcacccgacgggacagcattgacgtggatctttgatcattgcttgcgttacgctgacagctacgaaatttcccttcgtgctgcatacgaactcaattgccacccgtcgaagagcacaatgacaccttcatttattcctcgatcaccctccatcttccgcgataccgtttggtccaaaaaaggccacaactccaagtcttctgtcgatgctccttcttatgacactaatgccgaattccgtgcctgtttgagcaagactgtcgccgaagtgccttctcaaccttgcgcgctccctcccagcttcattatctcatttgtgcgccgctgtttctgtttggatttgtccgaagtcgactttgcccaggctttgactgcccttgattacatcagaaccctccaaaatcgctggaaaaaggagattgatgccgccttcaaccgactcaacgtaacttcagaggatgcaagggaccctgagcactcggaggtggctcgcaattatcctaacttgttgacctggtacgaaaacatcagcaacaaggcacgcacgatcgattttctgtacactcaagtctatatcggcctgcgtcgctgggtaagttttatcccgagatcggaatagcgagttgtgtgtctaacgtttgtttctcaggttcttgtcaatcagatgatgctcgagccattcgacaaagccaactgccttgctcttcttaacactctactcccacctgtccaccgagacagctctaccccaacacagcagttgtcgactgccacccttgggctctatcgtgatacctttttcaaatacattaccacctttgaggctgatccttcaatcgtggaacctatcatacagcaaggcgctgcacctggtgatgagaatggatggcctgcattgcatgccaccattgagcgatacatgaacgcagccctcgagatgatcgacgaatgtgtcttgatcaacgagccttgtcagattaccaagtctggcgtgcagcgccgcaccgattcgggtatcagcttcggcgtcgatttcggtccctgtcctactatttcgcactcttcagacaccgaaaagcccctgcctcatttcccggaaccgaccataggcactagcaagcatggttcgttcctggaacgattttcctccctgtcagcatggggcaagaagaaggatcccaagaaggagcagcagaaggagtttgcgcgcagtctgaagaagatgcaatccctcggaaaactcactagtccgactagcagcgccaagagcagcactaagagcatcaagagcgtcaagacaccaccaaagttcaaggcaaatatatctttcgatttgaccgaagacaagcgccggcgtttgattgatgaagcccaagctcgcaaggcagtcggcgctactgaggcggccgaaagcatcggccaggccacttaatcgcaacttctctgcaactcctaccaaagcaaaccagcaaccaaaaaaaaaaaaaaaaaagaaaagaaaaacccaaagcccagccaagggaggggaatcaacgtcccctccctttccccttgatttctagcactcgactcggtcatcccttactcttctttcatcctcgctgcagtcgcccccctgcaagcacaaaaccgagagggagcattcgcttccaactatgccaatgctaggcctctgttgtgcagagccagcctggctgcacttgtgtgacttaccttagtatgtttcggaacaaaaaaaaaggcgtttggacggaaagcatatgggggtggatttacgacttaatgtcttcacgatagcgtccagttcactggatttgaaacaattattattacctttatctttatcattctccctcccatctctcatccagtagatatagatacacataggatcttactactgtagccaatgcgatacaacgcggggtagaatatgtagtcgccatctaggtatactcggggattgggggttgcgccagttgccgctcagtccgccgtagaagctgcgataagatagcgaaacttcccaagtgtccagatcagatcagcagattcattctcgatctcactgccgtctttgttgagatccctggttatttggggcgtgatgattgtaaatggattgacctgcatatctgctaattaggaagcccaccctacatcacatacggctcgcctgatacgaggctatcccctataccatacaacagatatacacaactgccttctcacactacattgcgcgataatgagggttcctacgggatctcacattccctggcagtggtatgccgtcgtcggagctctgctaccaggctgggttgccaatgctagtccagccgtgaacgtggcgctccaagcctcctttgactcggccccatacctcgtcgagctcctgtacgttgcacattgagtgatctctcgcctgggatatatatgtcaatatgatggctaattaattcaatgtagggagtctgctgcagaagaaaactccaccgcctattttcctttgttggatcgcatcgccgatgggacgtttgaggacctcacaactgagaaggagctctacgaccgcttcttgacagttgtgaaggatgacggccatattcggactccggagggtctttcctcgttcaaattatcgctttcggtccgatcatcggcgcctcgtattgaggcgcacttccagttctataacacctcagttcagcagtccttgatggtggctcaagatgcggtgtgtcccgtgtgggttcactcggaaggaaagcagtattgctcttctaccatggagcgcgcacagcaggacgttgtcggagaattgtgggtagagctttgttcgtgtcgcatggactctaatagctgacattgaatttgtgcctttagggatcctagagagctaccgtttgatcgtgtcctaggcgatgcatcgctcccttcggccgttctgtacgcagatatcacctctccgatgttcagagattttcatgaaaccctgagcgacatggcaaaacagggacaagtctcgtaccgtgtacgctatagacctccccaacactggatttctcgtcccttgtttgtgtctggatacggcgtggagcttgctttgaagcgaacggactacattgttattgatgaccgtgatgcagagcagctcgaagaaaagggcgcccaaagtcttccaactgacccggatgagaccaaggaagatgctccaggtgacctccggcctctgtcttcctccgatgtgacccgtctaggcttgaactctgcgggctacgttatggacagcgctgatcctttgggaacattgatcaagatgtcccaaaatttccccaagtattcatcgatagtagctgcccacaatttcactggggaaatggcacaagagatccgccacaaccggttaaaaatgctccctggtggttacaatgccatgtggatcaacggcgtgcagatggacaaacaacagattgacgcattctcacttattgaacatcttcgccgagagaggaaattgattgagaaattccgcggcctcggtctctctgcggatgatgtcgtgaagttactgtcacatcgactcctcactgaagctcaagctagtggcgaggagcaacggtatgactaccgggataatttagaagggaaccaggttatcatttggatgaacaatctggaaaaggactcgagatatgagtcctggcgtggtgatatcgagggggttcgtacttatttcgtatggctattggacggaattcatattaacataattctagtacatcgccggctcttacccgggacaattgcctccggtgagccgggatctgcacaatgtcgttgtttctatggactcgtctaatccagaacacatgatgcttgttgctggaaacttgcacgccttcatcaaccgaggaattcctgtgagattcggcttggtacctaccatctcgtcgccagagtccattgcgcagctgaaggtagcgcattacctttctgatgcatatggcatagagtctcttgtgcaatatttccaagagtatgccgcgaaaggcaaaatgggcttcccagacaaatcatgcttccagtctgcgactagagaacgcgacctggttgacgaacacgaagctctgtctcttgatcaagtcttgaagagtgaaaagtatgacgctgtggtgtcccaaactggtgcttaccagcgtcggttgagtctgacgggcgacgcacctcaatttctagtgaacggtatccctgtctcccgagaaggcaactggatgcagggaatgagcgtacagatcagcaaggacttgaaattgatccagcaaggcattgttcagggaattttcgaggaggacacatggcttccggagtttttcctagctgacgcattcgcgaaacgcaatactttcctcatgcccgaggatcccaagagtgtacagattgtggacatcgctaatattcttgcctcggatgaagatgcattgagtaagactcgtgttctctcagacaagggagccctagagagcactcatatgatagttgtgggcgatttcgagtcagaggcgggtgtgaaactacttaccgatgctcttaatcttcgaaaggagaacagtgacgtggagattctgatgctgcacaatgcggcatcggacgccgaggatgatgcccccaagaatctcgctactctctatctctcgcttgcgaaggaggaaactatcgaccaagtactggctaagattgcatccggtaatcttgagactgaagtccaagatatctctaccattcaaactttgcaccaaatcctggccaaagaacttggattcaaccctggcactgagggacttgttgtcaatgggagagcagtcggccctattgagaaggaacatccgttgagtgtgggagagatgagccaactgattgcctacgaacgggtgaaacgcctcgattctgttgcggcagctgttgaggaactcggattcgcggataagatttcaaacccgctcgatttcgctaaattgacatcgcttgtggctctttccaccatctctgatgtccctgagggcattttcgaaaatactcctgatttcagaatggacgtctccggtaaatggaggacggagcactctgttatcaccatttccaactccgatgatcccacgattcacgttggtgttagccttgacccagcatccgaggttgcccagcgatggtcgccgattctgaaggtactgtccgaactctccggcgttcaactgaagattttcttgaacccgaaggaagagctcacggagctgccagtcaagcgattctaccgctatgtcttggaatcagagccatctttcacggataagggggctctggctcggccgcaggcgtcattcactggcgtgccagtcgaagcactgctgactttgagcatggatgtgccgtcatcttggctcgtagcacccagtgaatcagtctacgacctggataacattaagttgagctcggtcaagtctggtactgatgttgatgccgtctacgctctcgagcacattctgatcgagggccactctcgtgatcttacaacgaagactccacctagaggtgtccagcttatcttgggcactgagaacaacccctatttcgccgatactatcatcatggccaacctgggatacttccagttcaaggcacagccaggcttgtggcagatcaacttgaagcccggacgtagcgagaagatcttcaagatcgatagcgttggtggtctaggatacaatccgcagagcggtgacgagaacaatgaggttgctctgctatccttccatggtcggacgctattccctcgactgtcgcgaaagccaggccacgaggaagacgatgttctcgagacaggagtccagctaggctcaaagatggactattttgccaaaggactcaactttgcatctgacgtcctctccagtgttggtgtcgggtccaagagcggaggcgaacagcacgccgatatcaacatcttctcagtagctagtggacacctctatgagcgcatgttaaacatcatgatggtctcagtgatgcgacacaccaaacacaccgtcaaattctggttcatcgagcaattcctctccccatccttccgcgccttcctcccttctctcgcccgcgaatacggcttctcatacgagatggtaacatacaagtggccgcactggctgcgcgcccagaaagaaaagcaacgcgagatctgggggtacaagattctcttcctggatgtgctctttcccctctccctggacaaagtaatcttcgtcgacgcggatcagattgtgcgcaccgacatgtacgaacttgtcacccacgacctccaagaagcgccctacggcttcacgccgatgggcgactctcgaaccgaaatggaaggcttccgcttctggaaacaaggatactggtccaccttcctccgaggcaagccttaccacatctcggcgctgtacgtcgtcgacttgaaccgcttccgcgcgcttgctgctggcgaccgtctgcgcggccaataccagatgctctcatcggatccaaacagtctcagcaatctcgaccaggacctgcccaaccacatgcagcatcacattcccatccatagtctgccgcaggagtggctttggtgtgagacttggtgttcggatgaagatttaggtgtggcgaagactattgacctttgtaacaatcctcttactaaggagcctaagctagagagggctaggaggcaggttcctgaatggacggtctatgatgatgagattgcggctttggcgagtcgcgttgctggcgagcaggctgctgctggggttgagtttgtgcagactggcgaggaccgcaaagatgaattatagttgacccggtgggtttcattggagagcgattgcatttatgattacacttgttgcatttattggattgaatagtcaatctccgttacatttttatggaagatttcttctactgcatgctctcataagaattgacatcctagcaaacaagtgtataattgaatctagaaagcaagcaatagcaaaggcaaaatcttcatttcatgaagtttcacagctcttccgagtcactcttgtacttgaagtaaacttcgctgtcctcatctccgccgtctgagtcatatccatcgtcgacagcatcagcaccgtgagaaacaggtgatgtgggcaatgggaatgcttcgacaacagaatgagagggcttgaccaaagaggtagggctgccaatggaagcttgtttctgcttcttggactttttcttctccttaggggattcattactgccagatgcctggttagcctcctcggcagcgagacgttcctcttctaatatctttcgcttcttcttctcctccctcctcttccacttttgctctttgcgtgcggccttgtcttccgggacttcttgctcaatctgctctcccttttctttctcttgcctcttcttctctcgttgctccttcttctcgcgtttcctctccttcctctccttcttctcgcgcttcctctcctccttgctcttttggggggcgccgggagatgacggggctttctcgatgggaccggacgcggaatcttcattgtgcttgcgcttaaattttgacttcatatcatttttgagaggtgcgggcaagttgggctcaccctctttagactgcgcttcgtggtcagactcggcattggcattgacaatggaagatggtgctgcctcatcatggggctttgagctcggggtggtagttatcatgtcttcgtcgtcatcagtatcctcgttcacgaattgagagctcttcctttgcgtctccaatctcatgttccagtgggcacttttcttagcagcgagtttgggatcgaacaccgcgtctggctggccattggcccgcaggaccatgacctgtttcacgatcttgcgccatttgtctgcacattgttgtcgagaccgcacataaccaatctccttgctaatgttaccccatacaatgaggcgctcatccagctcgtacatgtccttgcctgccttatcgggaagcattggcttcatggtgacccacgtcgattccacagcgtcaaggaacatcttgtgttcttcctccgaccacgcaccttggttcatggtgttctggtgctcgagcttgttcttccagcgctgagtgacatcgtcatcactgcgcccaatgagcttaccaatgaaagtccatttcggaccgtgttgggcgtggagctcgataagctcatcatcttgttccttcgaccattcgtgtgccctttgagccgaagcttggaagtgtcgacgcatgaatcggtatacagatcgccgatcacgatccggaagaagagcgtagatctcgtcccaaaagtcgcctttgtggatgccatatgagaagaatggagattcgacgcttaattcacgggtacgctcagaatgctgaaccatctcgtcgaatttggcactaggaatgccatgcatggtacagacattgactttgtacgcttcgatttttcgcacttcatccggcgtatagaagccaattttcaagttgtccctctccctaatgcgcgagcttctaactcccttggtcttgcctcctggcgtgttgctatcctcagtgttgggcgagtcaggggctggagttcgcttggtggcagccagctgctttacagcggacggtccttctgcaaccgttgattcgagagtaggttgagcagtggatgaagtgaggatattcaagtttttgccattctgcttgcgaaccttctttgacgaagacttaggctttgatgtagtgggttggctgggagtgggggcattgtgaatagcaatttcaaagcgggttgagcttctttctggtgaaggtgactcggcaacggagttttctgatttgcgaggcttcttgatcttttttttgcgctcaggttcagagtcgcgctttcgctttgaaggattcgacatgttcgagtctaattctgagaggcgctctgtaccataggctttcccaatcactggagataatgcttcggtttctgatgatatgtgttccttattatttttcttcgtcccgccaaccttggggggattgggagtttcagggactgtcagattgcaaattttagtaccgagtcgcgtgaagatcaagtgatttcaccaaccgatatctccaaaatcgtcagcaatttcagggtatggttcgagctgagaagatgtatttcccatggcaatgagctgcaacaatgagtagggaggggggaagattagctgctgcaatgaaaaggagagaccaagcttcttcaaaatttacagcatgcagcgcggcaattgggttcaccgctgaagctgaccgcctatgtggaactatatcaattgctacagtacaattgtcgatggttgtaggagaacaatagaatcacaacgaagaaaggacttgagactaagataacatttgctaaaaatataaagcagaattattaaacagtcccaaataatggctggccattgtacaactttacggagactcatgtattccatacagtgttgcataacaaatctattatgtattcagacattgagcattcgttgaacacagtgctggcaggtatcatgctcatgattgcattaatagtgtacatgctggcataaagaacataagaagcaaatgcaagtcgtgaaaccaatactctaggtcctactgacacagtcaggacacgagcttcatatcccttaggattttcatcactagtttcttttggtcatgagtgtgaagattttgttgatcggtctcctgtagacagcgcccaattgcaacagtgaccttgacagcactttctgcagcgatagagcagtccacccacacctttccattgcggccaactgcaatctcaaatcctcccaagctctccagcttctttccaagttcagaaagaacagccagcccttcaattgcatccgtgttctcggcagaagtggagcttgctcgaatcaaccgggccgccataccagttgaaacatcaaataccattccacctgtcaagggtcccaatcctccatcagccttgccagttgctgggttgacacaggtgagttcaacttcggcgccggcaccgagtcccacggactgtacccgggcatacaccagctcgccttgcttcaacattggtcttgtcttcttggatgcgccctcaaaggacagctgacccagaagcgcgtgagccgtgtgtggagttaccatgcagtgaaagaaatcaacgctggagtggtggatctgagcaatgacgaagtcgttgacggtgggaatgtatcggcgattcgggaaagaaagaagcgagacggtgtttcgtttcgcatcggtcgtcaacagaccggcctgtgttgctgttaagacatgattggacccatttgaagagggctgtgataggatacggaggccggggcctagtcgtagagggttggagttgttggtaggaagatggtcttgaggtacctcatcgctaggtaataggacaagggcagtcatgatgctagactgatagctgtattctgaaaatatcctcagtgtagaatactccgagggaagaggatcaatgcttattgctgaatttctctcaggcagtctcaggtagatagatgcgactgcttttgcgcattgatcctgttggaaagaaaacgacatttcttatcaccatgtgacctcaatgaatgcccgcgatgccttatcgacaacgccacaaccactatcgataactattagccacatttgcggcagacgaaaatcttcaaaaatctttttcgatcgttccccctcaatcgagatttccaccaattacctccgatacccccggatctactctcacgccgtaacgtgagatccttgttctttcaatccaaaaaagtacatatttacaacttcgacatgggtgacgctgccaacagtgcgcccgctgaggctgagcgctttgctatcggtatctcctttggtaactcatgcagttcgattgcccgtatctcgcctgtacgtcctgatattcattctttgggtcaaataactgtgactgacacatttataggagggcaaggctgaggttattgccaacgaggagggaggtgaggacaatcaagccccacgatttgagaatttgaattaacatactcagatcgtcaaattccttccattctttcttatatcgacggcgaggagtaccacggcacacaagccaaggcccagcttgttcgtaactccgccaacaccgtcgcatacttccgcgatttcctcggcaaggaattcaagtcgatcgaccctactccctgccaccagtcggcccacccccagcagcagggctcgactatcgcgttcaccatccgcgacacctcgagcgaggcccctaacactgtcactgtttccgagatcaccacccgtcacttccagcgtctgagacgctccgcctcagactaccttggtaaggatgtcaacgccgccgttatcaccatccccaccgatttcaccgatgcccagcgtgaggcccttgttgcctccgctaaggctgctggtctcgacgttctccaactgatccatgagcccgttgccgctgtcgtggcttacgatgctcgccccgaggcgactgttgtcgacaagctggttgtcgttgctgacttcggtggcacccgttccgatgttgccgttgttgcctgccgcggtggcatgtacactattttggctactgcccacgactacgagcttggtggtgcctccctggataagatcatcattgaccacttcgccaaggagttcatgaagaagcacaagactgacccccgcgaaaacgctcgtggtctggccaagttgaagcttgagtgtgaggccacccgcaaggccctcagcctgagcagcaacgctcagctgagcattgagtccctggttgacggtgttgactacggttctaccattaaccgtacccgtttcgagcttctttccggcaaggtcttcagccaattcactgctctgatcgagcaggttgttaagaaggccgagctcgacgtccttgacattgatgaggtcattttctcaggcggtgtttcccacacccccaagctcgccagcctggccagcaacatcttccccgagaagaccaaaatcctggctcccgccacctctgtcactgccgttaatccctccgagctgtctgctcgtggagccgccttccaggcttccctcgtccaggagttcgaccacgaggacatcgagcagtccatccaccctatggtcactgtcacccctcacctgactaaggctatcggtgtcgagttcacctcccagaccgagactaccttccagcccctcctcggcgccgagactgccctccccgcccgccgcatcgctcagtacttcgcccccaaggagggtggcgatgttcttgtccgcgtgtgcgagggtgcccgtgagatcaaggtcaccaagcctgagcccaaggctaaggaggacaagcccgcccaagacgaggatgactccgatttcgattccgaggatgaagaggaagaggagacccgcgagatcatctggaagaccgagaatcccgttgctgagctcgccgtcaagggtgtcaaggctggcagcaagatcgaggtcatggtccacgtcaacgccgatcttggtctgcagatcgccgtccgcgaggtcggctcccagaacgctgtccgtggtgccgtcaacggctccgcttaggttttttttcctcgtgaaataaaaataaaaatgttggatttcgtttatggtgtgatgatgcatgcatgactgatatagaggctgtgatttttctttttgtccacgatttgtactgcagttatcgtcatggagtctttccctttattagttcttaaatagactcagttatatgcaaccaatcaatactggttctcttttcagccagcttcactctgctaggccctattcatttctgacgtatcagtcgacatttctccttctgctctacaaggaataatcattgagactagctttgctccaaagcgtggttacacaagaatccaagctatatgactttataccatttacatcgcaaagatcatcaaataacggtggtagatattatattacaactagattagataggttcgcaaccgaaagcacaaattcctgcatgatcttcaaatcggggagaatcatcgaaccatgggattcatcaacagatcatcaaaggctcgagtgccttagaaaacataaccggactcaaggcagggagagtatggcgcgaagaatgctcaattgccatcttatacaggaaggccgtagatttatcatgtggtaaagatcgtgaggggttcgtgatagcattaagcgagtgtgggtggttcgatcttccaggctgcatccgggtctatcagatgcagattgacaagatcgaagtgtaacaagcggcctcctgaagaaagaataaactctcaaaggggatatcaacgcgggaatacaaagtcgtgtgtgaaatggtccagagatcgacgttttgaagtcgacattttcaggtgctccggctcgttgtcgaaatgaggaagcgggcttttcatggcttgaggtatatccatttaagcgaagctggtgccctccttcttctggcttttcacgctgtttgagcgctgcgaggagaagaaaccacggcggcgctccttgcgtccactgtatccaccgctggtatcttttcggccgacggcaccaccgaggcagtacatcaagcatgaaaggaactggcaaacggatgcggtccacatgaaggcgaatgccttgacaccgaggtgtgcgtcctggccgttactcttgaacgcatggcggccctggacaaagacagcactatgaaatatagttagcattttgtctttgggacaaactaagttccgattatagtgatacatacgtcatgagacaggtcgtgatgacctggaaagtcaaaccgatccaggccaggaaaccggagaggtagctggcaatgcgggtgcacatggccagcataccagtgaagaaagagcacacggcgaagaacagaccgatgatgatgaaggggaacatgaagcgcgacatcaagaagtagtgcttcgatctatagcgcgcgtatgtatggttagcgcgacccggtaaattaggatatatcagttggaaacctacccgacaaactgatgagggatattttcggtcgtattaaagttacgatggcttggggggtcgaatgggaaatccacatgggtctctccgcagtcactcctgccgttggtcactccacagaggttccagaatgtccatcgcgaggtcgatgctgcgcctgggatatttcccgtgtctgcctcgaggaagtagatttggttcagcgggttgctgttgcgtacacctcccaacagagtgaggaagatcagcaagatcgctcctgccatgaaaaacaggcccgtaaagcccaatgttgctcctagagacgacgatcagattaaggtgttgtagagttgttaatcaggggtcaatcaacttactgctgaaacccattttgtttggcgcttattatagatcacctgggaattgaggggcttttttttcttttcgaaggtttgtctctggtctcaaaaaagaatgagttgctcaaggagagtgtcaagatatgaaagagaaggtgtcagaaattgaagcgacaaacgctagctggtatatggatacatataagagcagccggggtatccgggaccacttgagtagtgtgatataatgacgagtgggcatcatcctgctctcctcttctctctacaaagctcaagcccatcgacgatcataacgtcatggttgcacctgatagactagccgttcctagttagcttgcactatacttcccgcgctagaccagatcgggttagtctcaggcggtccatgacgaggtcaacaaccaaccgacgttgcacctctcgcaacaacattggccctttggaaggaaagtgacgtggaccatcgtggaccatcacatatgaaccttccaagatttcggtcttacccactcctgtgccttaacgaaaaaaaaaaaaccttgtctgcccaacccaatccccagactcgaccaagggtacacactgcgtacctcccaacccgtacaacgttgtaatggcgacctgggcatacccgccactgcccgcagagcagatcaaccgtgaggcggacactgcgctggtatgtaaaacaatatatggacccctacaacaggcgatctcttcatggaggcctggttggctgtagctatgatccatgaaggagtgtggagcccttttagtataatgccaacaacgtcttatcttaggcccgagagctagaatggctattgcattcgctgcaggattcacttgcttcattgaaggaaggtctgcaagaatgcgtcgccctcctagctccccaagaaccggggtcaaccttggtgctgtcctccttgcggtcggaaagtgtcaagggcttcgtgactagagtcggcaccaaggtcgtgaaaggcgtatgtatcttgagtgtggggaagaccaatgaatatgcaactaaaccgatatccttctaggatgttcaacttcgacttgcatcgctcccgcctcctcggggtgcccccagcacccgactgaacatatcccagtcccctggagctccggaactcgtacttcgacagctggtatcggttcgagatctcgtggctcagagcctggatattgtggatgtgagcacgtggacaggcgatcccctcaacgctggattcattttcagtcaactacaccttttgctcgagacaatcagcgaggcgcgacaaatgttgaaaggagaaagcgacgagacgcgaggcaagtggtgggataccagtgccaccgaagatgtatgttcgatttctttgacagaagtacttcgatatttttgctgatatatatactacacagatgtttgaccctccgcttccgccgcatctttctttccatctctccatcacagactccgccctggtccttgtccttcggacactggagcccactgccctcaatcacgcgccaaccgctttttcctcggatatctctctgaccgggttctcgctacgagatcggatattcggttcgcgagcgccaacccatgatgaggccggtagcctttttcaatggcagggagaagaagttcgtgtcaaggagaaggtgcgggtggagagccaagatcccagtctgatggcggtcatggcgaaactatcggcccttgagcatgaggtgatgcggtgcgttgctgcgctgcgggtgctcatgggcgatgaagatacagagagcgaggcttagttatttgattgataccctactgcatttggattatgaacagctgcttgttgcaacacttgattcattcagtattcgagttagggcctttcgaagtattgaatgggctgtagtttgagatatgtttttagcggccaccttaaggcttcctagggctaggactttgttagcatgccgtatgaaataaatgataccaaaagcacccagcaatataaccgcatattcctaaatatgtaccaacaaaaaaaaaaaaaaatcatccttggatgttatagatctttgataggtaccgagctacatagaacgcgaccgggggaccagccaatgagaggcccgcagtttgtgatgggcccgcatgaccatcttggcatctttttttaggcttggccattttctttttttcttctctcaacctctcgaaaagggactgtcgacaagagttggaaaatgttatcctggtcttcagcatcaggcgctagtcggtcgcaatcgcgcgaactatttcacaccttttctcgcccttctggatcgcgacagctccgcggacctgccaaccgtgtgatacctacaccgcaacgcactttcatccagaaatcgtcgcctttggtcgcgtctagcagtttggcgcaccgaaggaacacatcagcacaatgtcagcctcagcggaggtttttgtcaggcccagtatccgccgacttgccacctcaacccagccaatccaccgaaccagatgatatcaatatcctaatcgatcgaatcggcgaaaatgaggcagaaatggtacaaatactcgaagagctggaaattatgggagaagagggcgaaagagacgagctcatggacctgatcgcccagcgagacgaacacactgcagagtcgtgggtacacatgattaaacagcgctttggagatgaaatgccagaggggttgttggacgatgctgagctccagatatacgcccgcctctacggagaaccaattattcgacgggaagtcgaggaaacggttgaggaagaggaagatctgagcttgctccgcgaagatgggcaaggaggatgggaggaagtcgatttagaaggaaacgctgtcgccgaggacgaggccccactcgtctatgatatggaattttccccggaagagcgggaaacacttgccatgcagcggaccagagaagtggcagagcagttgggcggcgaggtcatgctcgaggaatttgagaacgaggcagttcctgactccgctccaagaatgcatccactcaccctcgagggaaaatacggaactgatccttcaactatccatctgccccaggatactgtcactggtcccatatcggtaattctatcggaattctccaacaagcacatttccgagactgctcggcgcctgtttggaggaccaggattgccccattcgagtacaacggcacctccacgtgcccaattaccacagcttcctgtcgctcttcaggcttcgcagcgtcaaatgggagaaatggaggccaacgcatacttggcagccctgtaccctgggatctacgcatcgaccctcagtgttatggttgagattcgcaagcgattgggcgtcgattggatccgccgtcttatcgctcaagagggtgggccaaacgttcttgatgccaacggtggtggtgccggcatcctggcctggagagacatcatccgcgcagaatgggagctcatggtgcccgatcatcccgcgggagcacccatcccatttgggagatcaactgtgctgacaggctccgatgctcttcggctgcgcgcttctgccatcctggaaaacacgactttcctcccacgactacctgattacgtccatgtgcgcgggaagcctacaattgacgactcgcggaaggcccctaaacgcaagcagtacgatatcatcatcgcaccacactctcttctcggccttgaagaagaatatgagcgtaaacagcacgtggagaacctatggtctcttttgaaccccaacgggggtattttaattctgctcgagaagggccgccagaagggcttcgaggctatctctggcgctcgtgaaatgctcttgaagcgccatatcgcaagccccggctctaccgaatttgacaacttcctcgaagaccccgaccaacgcgaggtcattgagaaggagcgcggaatgatcgtggccccttgcaccaaccactcaacctgcccgatgcacaattctgcaggtgctactaagggtcgtagggactactgccatttcgagcagcgatacattcgccctccattcctgcagcgcataatgggagcgaaagaccgcaaccacgaagatcttaaattcagctacctcgccgtgcagcgtggcgtagacctacgacaagagcaagcaattcgtcaagattcccaggctacagatgccgcatttgaagggtttgaggaccctgaggagtctgatatccctaacaaaccagccttccacgctctgtctcttccccgcgccatttacccacccatgaaacgccgcggccatgtcatcttcgatctctgcacacccgccggcaaaattgagcgctggaccgttccgcgctcttacagtcgccaggcctaccgcgacgcccgcaagtctcattggggagacctgtgggccctgggagccaaaacccgcatcccgcgcaacctgaaccttggcgataagcatggtgagggtaagaaggagcgtctggcccgccgtgtggcgaccaagaattctatgcgtgacgcagaggaagagggtgactttgagaatgaaggagaggaggaggatgaagactatacagttgatgactcggatattcctgatgtccctgtcaaaaagaggggccagcatatccccagttggaagaagcataatgataaaaagaagcttcgtcaagtgtacaacaagcgttctgccgacgaataagtggctttgatttggcgcaattctttttttggggtttggatgttcgaaaacatgtactatactaactactggcagcatttggcattgggacggggggcggattggatcttgtttgtacactaggatattattctcacttctacagatgtaaatatagcatcttcactctaatcaatgtttgataggtatctgataggcgtcatttagcccagagttaatttccctctccaatgagacggttggggagacggttgggcattccattaagtcggtcgtaatgaagcaaagtcttgtcacgacctgggggaactgagccaggcccaagaagcgccggtagtcacagaaaccttgtctaagctctgcaatgcacaggccgttctttaaaatgcaccgggcgcgcggggcattgatgttctgagaaagacagccgctggcttcatgcttggtactgttctagccagagctggcgcaccatccacagtcaggaatgacatggatagaaatcaaatgaaagtcaggttggagccaaatcctactgacaagctagtcggttttcgtaatagcagatattcctatctcgcaaagtgacaccgccacattcactgcgctgccatactctttcgcaactgcctttgcttctgtgtgctttgcaactccaatcgatcgactgcaaatttgagccgttctttcttctgcacgagtcttctcagctctgctgccttggatgctgctgcattacccgacgagccagcgctggaccccaccatgcgaccccgcagtgagctgctttgaggttggctgcgagtagctgatgaccggctctccggggtagacgagagtcgaccttcttgaagatcgcatttcgccttgaggccttgttcgcggcgcgcgagcttttcaacatggttcgatgatagtgtgaggaggtgggcgatgctgggagtgatttcgtcaaggagggattgctgcgcttcgcgtaatgtaggctccgggaggagttcaaagtgctattcaaagacaaatggttagacttatagcttcttgtttctcctcttggatgacaccttgggagagcatactcgagttgtctggaggactttgcataaacgagggaaatcgttcacgcccgcatcgagggtggatatagagttgtccaagatctggagagaggatcgtaatgaggtaaccgaggaagacaatgaagctgccatagtgtgtgatttgaagctcagtttggagatggttgtttacagtggtcgggatagatcgggctgtaaaagcggcatgacaccgcctttaaggcggcgtggcctcgggaccgggcaaacctcccaaacctcacttctcctcttccgtcctcctgcctcaccatcttcccgaacgccgaattctccccgcattcgattcacctgtcaaaatgtctctcctcggaaagaagttccccggcgctctcggtatgtgttttttggaccacgatcatgacttgtccgagaacgatatgaggaccattgactgacgcatatgctcttttacagccacacctatgactcccttcttcgctgccggtatgcatgcccttgaaaatccgaaattccctgaaaatccgcaacgcatggattgccaattaagaacactgcaccctttcagcagtcattgatggaacattactctgacgattctcctctccaggcctcattgtcctctacggtgtcaactctctccagaacgctctgtccaacagtgagtccactccgcacggctattcatagatgacgacgattttgcggtcacatgcgacaatatccacaaaacaacgctatgatgagcatctgcgagcatcagctactaaccttcatatccgtacagccgctcagtacaagaacgacccccgcaacgtcaacgctaagcccgctggcaaggctgaccactaaattgggtcgacaatgaatgcattttgagatcccacttgttcgttgaagaggagcgggacgaaccgtcgcgatgtgtgggcggacggagatggcctaggtcatcaatggccggcttgcactttttgtgattactctgcgagcagttttcccctgttcaagcatatagagtgtacccacttcgattggggtgacttggatcaattcacaaactgtaccagtaccgttctgagcaaggcgccttttccttttgtagtgtctcttctgctggatgatatcctatatttcagagcaaggaaagtaacctaagccgaatattccggagcctgttgtattgcaggtaaagctatagggtttggaccgtatacttcatatctgctcattgcggcgctatctcacttagggctagtttttcacttctttgcgaccgcgcaataagtcgaaattagcccttattcaatgctttgtcatttgattccaattgtaacagctgactatccctagtactagttagtagggctttgataccgctctcttgtatcaaatacgctaaacccgatcgggcatccagttttcgccaactccgcctggccgaaggacaatcattttccgacctcaactccgcaataaccccaattaaacacgccaaaatgagcaaaacgactaaaatggcagggcttttccggcccaagaagcttgatctctctggatttgtcaatacccgcttgattcgggacaacaacaagcgcatggccttcgagcagactgagccagaacggtacgaacactgtccatctcctagatgctccagcttgaccgaggatggctatcccgagctggaaaatgcttggaattgaaaaacaaatgctgactctgtcttccttcgcagacaagctctccgctacatgatccgcaacacctctctctctggccgagtgcgcgcgcaggctcagctccaattggcgcagatgcacccctatactcgccctacgcagatcaagaaccgttgtgtggcatcaggcactgcccgcagtgtcttccgcgatttcagaatcaacagagtaagtggaagacttcagccaatggcctcatattgctaacactatatttttctacagtatcaattccgtatgcaagccctcgctggtgaactccccggcgtgaggaaggccagttggtaattgtatgagattattgctagttctctgtaatatgtggagaaatctagttgaattgtttgcacgatggcgttttcttctttccttccatggggtggaagcatgtacaatatgcatctctcattagtagagaaatcaaatctttctttgttatttttggatcctccgattcaaactctgctactctcggcgtaggaattgacttattgacaggcctaggcgttgcctgatcctcgtttgctaatgtcgtgagatcaggctttctttgttggcagtgttgagaccgtctcaattgggttgtttgcttctatcatggtggttagttgcagatcagcctggctcatttgattgatacctgactgataattcatcatatcagctcagtggtggtgtatatcatcctcaatatcggcgagaagattcttcatgtccgcatcatccccagtaattgcgcaagtagggagctcctcgatacttgccataatcatatcgtgccctgtcctgaaatcactttcaaagctgcggtgccttccggtcctgctcgtataaaacctcccacctcttcctttcgttttcttcttcctcttcctcttctaattaaccatcactcataaacatcacccatcttccccttttgtccctttgaccttcttctcaaatcaacctcacacattgatttgaagcttcgccacaatgaacagcattccggaggacctcctccccgatgacatcgtcttccctgaagacctgctggagcttgggtaagtttttccgtggttttcaaggtgacatcttagccttggagtctaacagtctattgaatggtacagattcgtcatcaccaaagatgacaagattcgttacatcgacgccccgggccagggccctcgttacaagatcaaccgaagtgaccgcataaaccaggtccacatcgaggcccttcacagtgagtttaccattagattcatttccatcctaggatgtggtttggatgaatcatttggcgctaacaactccacagaagcgattcacatcagcatcattgaccgcctcctgggaatgggcatgcatttcatgaaggtccccgagggcagcaagcagcagcttcccatcatggtgtcgggcaatgtgaccgctgcacctcgaattgttgttttcttcggtgagattgtcgaggacctgggtgtcttctcgtaccgtgacgcttgcgatgacggtatctctttcggttcgatcctgggctttgcaaagggtctgctcggtgagaattctctagattcgccgaatgctcttattcttgcgaacgcgggccaaaccgtctggtacaatggaaatggtggctcggcgatgaccacagacagtcttcatggccaacatcgtgcctctgccgtgcaccgcgaacgttcactgggtgcccgtaacatcattaggggcaacatttccattgatgatcatgtccggaatatctttgagcaagtcttgatgcgcagtaacttccgagtcgatgccagaatcgacgtcattggcctgtctgagggcggccatgctgccatggcatacctgaagaatcgatgtgagtgtctgactgaataaaatacctagagttcgcttactgagatggttctagggagtttctggatgccccacatctcctccctgtccttgatcaaccccgagacgattgttagcactgacgccaacaaggcttccgacccaaaggagaatgacttattcggctggttcatgaaataccgttgccgtggctggaccatctgtgatcagccgattggtacacgtctgcgcggtcttaccctccctcatggttgcaacacgtactcctccggcgaaggcacgaagtcgtcgggcatgattactcgtggtgtgggacacatcttgacctggatgaacattatgcattactccccagcggctatagagagatttgatgtggtcaagggccagtataatcccaacttcgcagctgagctcggagcaatgacctacggagaccaggcgcaactccctagcggcaagattgaagtgcacagcctggatgttatgaaacagattaaagacttcctggccggcgtcaatttcaccgaggaaatgaccacttttttcaatgacaagccgtacttcagtgacgatagtgacaacgaaagcgataacgacagtcagcgttcggtcgtttacgcagataaggacaatggtgtgttcggcgtccctcctgccattcctggcactcctaactccttcaggtgctcccaacactcctcctgacactcctgacgctcctggcggttctggcgtttctggcactcttgacatgcctgttgacatgcttcctgatgcttcctctggcacttcccctggcacttcctctgatgcttctggtgttcgtgatgttccttccaccatccctggcggtcctgacgttctttctgactttcttgctgacgcactttcagttccggaaagtccaacctactatgacgacgtaatcgtcggtaagactggcccgttcgacctcagtgatctgcaggccatccgagaggaggacgaagggcaagagtaaattctctgagtgtgccctgggtttcttctggattttttgtttcccggtgttcctaccggtttatttttgcttttgcgctgggattattcgcgagcagatgcatgttctttcctccctacttgaggtcaattgactagaaaacacaaaagcacaaaaaaaggagggaaatgaaacccatctgcggaagcgaatcaataaaacctagcgtatcaatttcccaggccatttttactgtatgcgacgtgagtacatatgtacatgtaagtatgttgggatagaacggtggaattgttcaatgaaaacccggcaaaatcagggccaagacggccacgacggtcacgacggtcacgacgcaacattctcaaccctttccgagacaagcatttccccccaccggaacagttttgatcgagtaagaagaattggaccggaagatgcccagacgagaagacagtttccatcgagtaatctgataaagcgggccattgataagcggcaattgcccggagattccacatcggaggtggccgacggccttttctcgcctcgatcgatatgctatactcgtctcaacatgccaatatcccagagatataaaggcacaggggcatggcctctcaggtgcttcctcgtatggcaaaggtgaaggccattctgcagctgcatgactgtccgaaccggctggtttgcgagtacataatggcaacaccggggtctggaataatggctcggcagtgggcctgtggatattctcaggatattccctgggtaatccccttcttcgctgggagggagatcctctttaaccccaaggtgggcccggactgtttttttcttcggaggcagtgggcgtatttatatctcccccggtccccttatcttaggcctgttgcccctcttatcttctgcttatctgaacggctttcttatatttgaaggttatcttttggttatacttcagtcttcagttcgacatatctagttatggcaactaatctcccctccattgctgtggtggcttcatctcgcgccgttatctccggccgtttgacttctgccactgttgtgatctcactgacaaccggtaagatcaccgccgtcttcgattccgtgatcccagcatcggagttccctgtgaatactccctataccgactactcgcctcatgttttgctacccggcctggttgatgcgcacgttcacctgaacgagcctggccgcacggaatgggagggcttctacacaggcacccaggccgctgcctttggcggtgtgactactgtcattgatatgcctctcaatgccatccctcccaccaccaccgtgaacggcttgaaggagaagatccaggctgcccagggcaagtgctgggttgatgtcggtttctatggcggtatcatccccggcaatgcgggcgagctcaaggctcttgtccaggagggtgtccgcggcttcaagggtttcctgattgacagtggtgtaagtgaatgatatcagcatcgtgtgttctccaattagtattaacattcttcaataggttgatgagttccccgctgtcgggagagaggatattaagaaagtcatggccgagttggccgatgagccaacaactctcatgttccatgccgagatggtgcctcccattaccgcatctgtgggcgacgaggttcagacatccgatgcacctgccgaccctgccggcccccttgaggcgtatgcgactttcctggcctcaagaccttcttcattcgagacctgtgctatcgaaagtattctgtctttggctcatcttgctcccaatctccctctgcacatcgtccacctctctgcaatggaagctatccccttgttgcgggaagcccgcgccaatggtgtcaagatcacagccgagacctgcttccactatctgtccctggcagccgaggaagtacgcgacggcgacacccgccacaagtgttgcccgcctatccggtcaaagctgaatcaagatagtctgtgggaagagctggagaagcacactggtgacggcgtcatcaagaccgttgtctccgatcactccccttgcacaccagatctgaaaatgcttccagcccatgtccctggccactgtaccggcggcaaggaagaggagagtggtaacttcttctctgcctggggcggcatttcttccgtcgggctgggcctgcccattctctggacagacctcagccgccggaagggcctgacttcctcgccagaagacgagaacaccaagaacgcccttcaagacgtcgtccgtctctgctgtgccaacactgctgcccaggttggcttgcagtcgcacaagggcgacctggttgtcggctttgatgctgatatttgtgtttttgatgactctgccgaatggaccgtcgagccgagcaccatgctcttccgcaacaagtgctctccctaccagggccgtactctgcgcggcatggtccgcgagacctggctgcgtggtgagcgtatcttcagccgcgaccagggcttccatagccaatcgccacacggcaagcttcttcttgagaaacgagtttgagatattccctgctttcttactcttcttctttctttgtccacgcttatctcggcattgcgccttgctatctcttctatatctctgccactttacatctcgatctcaacctgtgagatcgaaccctctgatgaaccctctgatgagcactaatgatcgcacaacattcatacccgttagattaatgacctcgcattctagcttttagatagaatactaaaagcaatcaattgaatccttccaagtctcttaaatcaagctagcacagagaaatacagtaatacagtcattattgttgaatactatatagatacatatcaaagactcccaacatccttcttcccatccctccccttctcccacttctccctaaccctcctcctaacacccccattaacccccttcccccaaatttcctccttctccgtcccaacctcaacagcctcatccgcactatcctcctctccaaccggcccaataacaaccttcctctccttaaccgccctctctttaaccctcgcccgatccaccttttcaagatatgtccagtacaagaacgcctctgcaacggcaacactcagcgccgaaaacaacccgagaagaaccttaaccgcctcgctcgccactatctccggcgtcgggaacttcgtgagcgccgcgtacacgccgaacccggtcaccaccaccgagatgaagacactcgaaaccagtgagaccgtcagcgtatcttcttctactcggccgtcgctcgtgtagggcgatgcgtgtggatccgcgtggtcagcgtttggtcggtagtttgggtttaagagtcggttgtaggattcttgttcagttgctgcgatgaggcgtgcttttgatgcgaggtattcggcgctctgtattatgtaggatgttagaatctggtttggtgtggtttgtgtattggaggaaaggaagggattggatggggttgtgtatagaccacgtacaggctctggcttcttcggcggcggagggacgtagactttcgtgccgcggaggagggaactgaggacggttgggatgtgagaggcctgctctttgtattctgggtcgttttggaggtatctggcgagccggatcagttgttcgtgggctattgggccttgtgcttccagcgtggtaggcaagtctagctcctcgtggcgcgaagctggaatagcttcgaacgcggcgaggatgcgatctgtcgtaagaaggaggaccattatgatacaatccaatggaattagggcagttcaatagaattgaggtttagttcagttcatggggagataaagcggaaccccaaaaaagtggcagttaagctccccacatcgtcatatcttcctctctcctctctcacatacatttttgcgactatggcggactcaaagaagaggtaaatttatattcctattctatatatctacatccccttctatctgccaacctccaacctcaatcccatgcccgcatccacagaatccagaaaactaacccctccaacagcacggtaacaacacaaaccaacccgcgcgggatccccgtcgccccattcatcgacaatgtcagcgactacgtctcctcccgcgaggaagtcgagcccactctccgctccttccaggagatgatctccaagtaccagttcatggaggtgaacacgcagcgccgcggccagggcttgcgcgagaagatccccgatatcaaaaagacgctggagatggtgcggttcttgcagctgcgcaaggaggtaaatatgccccgcgcgcatcctctatttatcatacgcacttcgaagaaaaggcgatttgtggaacatccagctttgggaaattgaatcggaaattggaattcgggaatatcaagttcactaacactcacttttctagtccaacccaggctccgacctcgaaactagcttcgaactcaatgataccctctacgcccgggctgcgatctcacctgctgatgccgaggaggtctacctctggcttggtgcgaatgtcatgttggcctaccctctcgacgaggcggagaccatgctggatgacaagcttggttctgcggagttgagcttgcagaattgcgaggaggatctggaattcttgcgcgagcagattacggttagtttattcggtttgcgggcataggtgtgggaggttggtatattggcgcttttgctaacatttgactttttgcagacattggaggttgccacggcgcgtgtgtacaactgggatgttgtagaaaggcgtaagcagagggctgatggcaagggtggtgaagaggaaacgaaaaaataagaagcgccctggtggctgaatatgtcttgaagagatttatgggatattataaaaatgttgccaatgtcatcgattatgaagggtctattatcttccaggttgaatgtcaaggaaaagaatcaagagaatcataatgcagcatggagaaatattgaaaagaagtagtgaatattaagtatacgctctaaactaaatgccctatgcatataaaccgaaaaaagagacgcatgtcatgattcgtgaaaaccttgagaggtaatagaaaatcgccacaaaaaaaaaaaagaaagaaaaaacagaccatcgaagtgtcctccataacttcgttgagtttgaggacgccaccttcactatgaaccttccagtccacgcgcctgtacggcatattattgttggcgacaggggatccgaagatggtagagaatctcgacggtgcgctgctgtgtcccaaacaaaacgaaatgctaatcattcaactttgggaaacagaatcattggaacatgttggaacctagtctgtcggcatcagaagcagctcgctcacgcatccgcttcgagatgtcaaagccagtttcatcaccgacaaaggtccactcctcaatgtcatcaaggtcatcatcggctccatccggggaggtcttagctgtaggtgtaggagagaatggggtggacgaagcaagcgacttttgtcgggccaaggtcttcgcgtattcaagatcacgataaagggcctgaattgcagtagccacgccgtcttcctaaacaagggaatatcaaattagcactccatcaattaagcttgggtagacttagaacaactcacattccgaatctgaacacccagatttgttgccctcataatcatacgttcactgtgcgtcgcctcccacagagcccgcgagaagacactgacgttcagtttcttcaagcagatgccaacgcctagatcctccacccgggagccgaagaagaactggtctccgaagaatggcttgatgatggtggggacgccagctcgaagacttgccccagtggttcccgctccaccatggtgggctgcagcatcgatttgagagaaaagccagtcgtgaggtgcagattggatctggtggatttctggtggcagaggtatctcggtcttcgtgctagctgggtcgccaagcctatcggaccatcccttcgagaggatgcatcggacatctgctttctggactgattcgatgacggtccgtgtcagagcagaaggatccgagaccacaatggatccaaacccgatgtacacgagcttcttgccatccgctctggcctgtgcaatgaaattcgatagttcagtaggaggagtccaatctgtgccctcattcaaaaaccagtagccggtaatgcgaatccaatctgggtaatcaagaggagggaccaccacggagggcgagtagttatagaggaacggaactttgttctgctgcatcttgtctagggttgtggccttcaatcccaactcgttgtttcgccagcggttcacttgccccgcgatggccttccagaagatgttgtcgaacatgacgtatgtgatgtagttgtatgctccacccatgcgattctctggcactgcgaaagcatgagggtaggcccgtgttcttgtccatggcatggtgaatccgcggaagtacggaatccttaaagcctctgcaatgtgaattccggccatggcgctcggtgactcgattagaaggtcactgccctgacaaccaatccaagccgacgacaagaggtcatcgatccatcctctgaacttcattgaagcttccctaaggaaggaatatgtaaacatcccgttctccacgcaaattcgcattagctctgcaggatcaccgtcaacgggagcaaagtcaatcccgtgttttctgatccagggctcgaactcggcgtgggttgcaattttcggtttatggccctccgcaagcagtcctttgcagagcgcaatgtacggttgcacatcgccccgggagccgatggttaggcaggtaatccttagaggctcggaaggtttgaagttgataatggaagcgcgaggatcgtcgaagaacggatgtatttccgatgaatcctcggtgaaagtcggacgtgcatcatcttcctcggggctgtccagccttgcttcctgaagcatgcggtgctcagccttagctgcttcaacttcgtctcgttcttcttctgctagcaagccagattccaccaggaatttcacggactctagattctgatgcagtgtgactgcacagtcatctcgtgaatcggaggcattgaactcaaagaaaagctcttcatggccacggatgatgacaacaagtccatggtacccaaaacggaagcccttctctttttcaacgttctcaatgtctttgaagggtagaatcatcttggtccgagtgccaggaatcaggctccggaagcaaagtttcttctgacttatatagatcttgccgtatagcgggagcacacgatgcaaataggcgtaataggtcgcctgcagtttttcggtagatggaagagcgaagtgtgcgcgaaagcgatctccataattgaatgaaccttcgttgtcctcgggatcaacgttctgatcttcaagcaatggcccttcccgttctccataatgcttctggccaccaatccacatgccagagaccttttctatatagcccattgactctgttgctaagagtgtactcatttgtttcgagcggctcttcaagtattctgcaaaaccagcggcgcgttgaagggggtatgcgcccactttgacaagatcgtttaaatgagtaacggagctcggccctgaagattgcattgtattagattcgccagcgatatatcgcgtgtcttcggtggtttcattgcgacctagtgttctagatggagagcctgtcgctgcacctaggtccagccgtgtagacgcggagggggtcgtatcatcagaattccgttgaatattttctccgacacccaatgagcgtccttgcagtgtgcgcatagtgggtgattggaagacgtcgcttctgtgtagtatctgactggcagattcagtggtatctgtcatggattgtacaatcggcgatgattcggtcccttgctctgcaaatgaatctgtcgagccttgattttcgtgtcctacgctggagcttcgcttgcgcggtgaaacttcctgcctctgatcagacaaacgaacgctactgactgactgtctcttttgatttttgatatcgtgttggctctgcggctctttcattgcagaggtagccgacgcagcattgaccaggcgcttgatgtagttaaatgcgtcttggtccgaatcaaagaatgagaaaaagtactgtgaactgattagcaatgaacttagtaacgtttcatccaacgacctacctcgtcaattgcgtatgtttcgccgctgtcgagaactcgaatcttgaatgtctctgcgaaatcggccattgggctctcctccaggtcaataatattcgctattgggaatgatactttgacactgtcgccttcattatgcgtccggaagatgactttctggagggctttcacccattcctttgcactggtagcactgtctgctctgaataaatatgtccgctgatcagtggtgacctgaaagtccttcacatcaccgtctttgcgatctgcgagagacgcagagatcccatatcgaagatcgacatgtccgctagggaaatagagattggagggatctgcgtagtatgagaggacatcacccttcagcgcgaaccaatagcgatgatacgtagggttcttgcggccgcgtttggataggtatcccgactttatcgccacgttggacttctttgggaggtaggcgtaaaagcagatgtgaccttctgtcacatacatgtagccttgaagaagcatgctctggagcaacgagcatgcatactccaccagaaccttttcgggcttcgcaaactcaaacatcttcatcaatcgcgtagaaagagcggacgcggacgattccggttggtcttccatgggtttgtttagattgggtggcgagtgtggtgttgccgatgttaagtcaaagtgagattgcgcttcaaccatgcgacttagaaccggggctgctcgcggcgtcgcactgcgagttcgccttaaaggaggcaccttgagcatcgggtcgattgagtttgatgactcgcttgcctcgtcttctgaatctaacttgggtaatctctgcaaaagcttattgtctgaccttgttctttgatggcgacgtcctctttcttccagaaccagtgtgtttgattctggtctcttgcttggctggcgggagtccaaggatggcacaggcgtccgcgatgaagggtttccactagtttgctccatccacgggtgttcttccatatctccatcactatcacttgattcctcaaaccgggcatggaagtccgacttggacccgacagcagcaatcatggagaagagggactgttgcatataatgcacattgccgtcccgtgaacccataccttgcggcggagctgtgaaatcaaactgagcatcatccccatccttaaatttgtctggcactcgatctgaaaatggacggttggacgaagtaggtttcatacttgcgctcaactgccggtctgcccggcgtttggcatcgtctctaaacggtttcatccttatctctggtacaccgatacgatacaatcgatgcaaaatgtgggtcaaggatgggagtaaacgatgctagggcgcggtgaatcgctgagatcggtcgggcagtcagaagctcgagccaggtgacagctcggcgctgataggactatgacgatcaggtatacactagtcaaacggcaagacacatcagtctggacaacatgtgactttgtcatatcaaaaccgcggtcaggcgccaaaatcgtgatgagcagggttaatggtgaacaacgcacgggatggcagggtctaggccgataagcgctttgaagcttggacactatatctggatgatgctgtcaatccacactccaaatcagccaagcgccatgatatatattaaaaagatgatggaaatgaaaaaagaatggaaaggaagtccaaatctatcccaagagttcacagaaatctcagaatgcacaaagggagaaacatcacctgggctctctccgcatgcatgtgatctatgactccatcgccccttatgtcagctgagtgcctgaggcaaacagaatttatatgttgtaggcctttatgcctcttcagatatattgaataccaaattgaagttaaattgaagttgaagcctattactttgcgtggaagggaatcttaacttagagaggcgtttaaaaaaagagctcatcggactacactcattgcttcgacactatcaaatcaacaaaagacaatggaacacagagaaaataagattgtaaattgtacatagtattggggacgtcgttaaaccaaagctattctcaaaacacactaacgccaaatcatgccttttcggacttcttccgcttcttttcttccttgtccttgtgggacttcttcgacttcttccggctcagactatcatcctcatccttttcttgtgagtgcttctttgacttcttccgaggaagcgctgcagcttggggagcttcatcctcaacgtcatcgtgatcaagcttcctctttcgttcctctcccttgggaaccttgaacgaaggcgcctcaccctccgattccgagctagatccaagcgtctctggaagcgcactcgttgtaccgacaggccggaagcgcattttcatgtgcttcggctgcggccgggctggcttgacatattcgcgcaactctgccactacagcatcggtcttttttgatgtgcttgggagaccgatcatttcttggacgtggtaacttgggatgctttgggctgctgtggaatatgtttgtgtcttctcgtcgaaaagaagtagtgatttggttgcgggatcggcctcggaaagagcctcggctgggatgccgtagttcacaccgtcgtgggagatgatcggttcaccctgcatgatcttggccatgcacacctctttgattttggacaaaggtagagaggccggtgctgtgaggtgaaggacttgcttgccgtcgaggttggagagaagggaggagactttggaggatggcggggcctgcttctttgcagacttgaaacccgctggtggtttgtatagctgaggaccggagattacaaccctatgggcacaagtattagttaccataagagccgatagaggataatctctcacttcttgcctgagctggagtcgggcttcatctcgttggagtcgtcggagtcgctatccgaatccgaacctgagtccgaggtatcatcttcgcttgattcctgtacctttgtattcttcgtcatttctttctctttttcagtcatgaggtcaagcgaggccgatctgctcgagctgctatcgctgtcggatgatgccatggcgattgttcaattgtgtagggcaaactcgaggtcgacactcaaatgctttcgcaagaatgcgcggcgtttggtacacccgaaatccacaagacgaatgaaatgaaacgatgaagtaatgtacagggtatatacgcgaagtttcagcaaagccgatttcgcaaaatgaattggatcgacgttgagtgaggatgctcaggtccaacgatctttttttttctgctccgcgggagcacggaccaccagccaactttttttgcttatcggctttggatcgcattatcgaggtcgatttcttttcgaacacaagctcgaagcttgtctacccggactgtataatatcatggttaagcgaaaggccgaaaaacagcaaccagctggtaagccgtctatccatgccctacaactctaatttgaagctcacatgtcgtttctctaggccctgttagcgctgtcgctgctttggcagcgcgcagagctcgacaacaacaagaagcacagagcgcgaatgtaccagcggatgcaccgcaggctattgttgcgagcgaaccaccctcgaaaaagtcgcgacagtctctcgatggacctgaggcgactgggacaaaagaagagcatcgtacacggacaaaggcagcaaagaaacaagataaactattgcgcacagagacaataccggagcggccactaagagctacccggcctcaaaaattggaagtgaagcccgagttggaggatactcatgagcacctctcagacgagcagtctgaaaaggaccaagtcgagcatacagaaaagatggatgaggatgatattgcatctgttatgggtgatgccgatggctatgaatcacccgcagaaacacccgcagagcttcggaatttccctctatccaaggctcggttgaacgaaagcaacatagtctacagcgatgagagcacactttgcattcgcattaaggaacgcacggtatggatgaactttccggccatttggagtgaatactgatctttcccttagaacctggcgttggtgggccattatgatctctgggtcaaaagaggtgttgtcagtctgatgggcgcgaagttacatccgtcctcgcagttgcatagagtttatgctccctcgacccactctttgccagttatcaaatgtgttgctggaattgatggcgacgcagaagtagagatcaagtcttgtactagcggtatctcccgcctccgtgacctctcgcctctgtatcaaaggatatgggctggtgagaacaccgctgcagataaaatcaccctgaaaggagccgccaaagactcaaagcggactttttcagtggtatgcaatcatactctactccagctcgagctgtgttcaaagctaattgacttgacagttgtatacttcggcagatgattctttaaatagacatatccgaccccttcacctcgacaagaaatggagcgcgtcgatgaaaggtctctcacaacgtgaaggccaacttcgtgttctaatttgtggccccaaagcatccggaaagtccacctttagtcgctacttgttgaatcacgttttaagtccgacacccgagaccgagaatggatatactaataccgatggagttgctttcctggatctagacccaggtcagcctgagtttgcccctatgggtcaagtgtatctcgcgcggttgcgctctcccttcttcggtccgcctttcacccacccgtcattggacgattcccgtgacggtgaaatagtgcgggcgcatcatatcggcgcagcgtcgccaaaagaagaccccgatcactatgcactggccgtcatggatcttatggatcaataccgctcgttgctggagaaacatccccaatgccctctgattatcaactaccccggttggatctttgggcaaggattagaggttgcgacttggctggtcagatctctcggtctctctgatgtggtatatatgagtgaaaaaggcccatcagaagtcgtggatccgttaggtctagctgcccgtgaggcccgagtccccttgaccattctcccatctcagcccactgattttgtgagccgatcaagcgctcaattacgagcgatgcaaatccagtcatacttccatatgtctcatccaaatgatctcatcacttccctttggtcagatgtaccgctatctcgcacgaggcctattactgtggactatgccggtgcacgacaaggtattttgggcgtcatggtaatgggatcacagatcaatcccgatctactgcacgagacccttgagggtgctatcgtaggcgtcgttgcagtggaatcgccgaacgccatcatgagtgagatgtcagcatcaaatgacgaaggccatgacgatattgacatgggttcagcaaactcaggcgcgggtaattcggctgagctttccatccctgactgcattgtgcgaacatccgaagatcttccttatctctttgttggttccggtagttgcaccccattggatcccaaagcgtcaaactgtcttggtcttgctttggtccgttcgatcgatacctcttcgcgcaagcttgagatctccactcctattccctcatctcacctagaaaaggccatcgagcaaggtcatggcattgtgctagtccgtggccagcttgataacccgaattgggctattagtgaagagtactacgccgctcgtgcggcagagcggcgctaccagcaatcgacctctgggccgaggaaagctggagacattggcagtgaacaggcatacgagctggatccggccgagcatagtcgaacgcttgcactgctgcgagagagggttcgccgagcgagcaatgtgccttggatgactgtcgtggaagataatagtcgtcaccagcgtgaagttgctgcgcgacgagaaaagtcactatggaaattgaggaagaaggcatatcccggcagcgagagcgaggcggactactagctcccttctatcaaatatatacatagaatttaaatgtgacagcagtttgcacataaagttactgatttctatgtataggcctggaggtttcacaaggcatttccaccccaaattcctcattatttgattctatgacctgtgatttctctcgggtttggctactgattgaatccgtgatctgtatgtagcaacagatacgaatgaagagactaacttgaagcattgaaaataccacaaattgagcgaagacaggaggactaggtgtcaactggtagaattactatggcctgaatttttattactttccatgcaacgcacttttcttgacatacaattctagctagtcaaatcttttcatttagacctatagattgatatctggaaggatgtagtccatcctgagccaatggcaaccatacatcctcatgcgattccacaattcagtcttccttcctcgcttaacacagtaatactttccataataccgtagttttacttgccgagatcgatagatgtcgatacagatatactatattccgactttctccccggcactgtagatactatgagatctttagacttgtcctagttcaccccttatgcagccaccattctacaacggactagagctatggtaatgccaatgttcgaacagacacagagttttccaattattctactcaagcacagagatcctgtccacgcttaagggattgagatattgatgtccacgtcatttggttggtatagacagaatcatgctaggcttagggtttgaggaatggctagaatgcaaaggaggaagccatcagtgataatttccttttcaaaatatactaggctcaagtctggcgttaaggcctttcccccgataatagtacctttccctgataagatctttgatcgatagaatacggcgaaaaagaccaaatgataagtgatttctcacttaatcttctatactacatcgtggaagcgagattgatgtgtctaatgactttataaaaaaggcagttaactaagagattgtgtatgtgctgaatcatccggctgctggaagtatcctcctcccaatcgacaagatgtataaataagctaatatcgactttggttgtaaattgagaatggctttgaggtcccatatcacagcggtatttattctcgagccaacgtagttccatgctaattttgtaaaccaaactgcatacacactgtcttcacacttccctccgccccatagtcgctcaaatccatgtcaataggatcccctatatcatgaaacccgcacttccgatacatcgcgtgacctgcagatgatgcttccagccatgctggtatcttatggaaactggcttcctctagccctgctttaacaagtgcaatgccgacgcctttatcctgggcttgaggacggaccgcgagaacctcgaggactataggacatctgagtaaaggcttctatcgtaaaaatctgttcaactcacggctagcgcattttccagtaatccattttcttcgccttgctgctacagctctatagaagtctaggaaggctgccggattacccgcagtgtcgggggctgttttctgtctctcttcggtggctgccgcttctctttcatgggttttttggtcaaggtagacagtccacaatgaccaccccatgatttcaccagtctttctgtccgtcgcctttaaaaacagtgcagttgaactagtcgtgagtagcccccgaaggaatcctatcatgtcttctctctgatctggcgagccgtacatcaaatgcataagcttgtcattttcaaatgcctcatcatggatacgaacgagggtcggaatatcctcggcggtgactggttgtaatgagaaagaggatagcctagacattgtgcctcgaggcttccttgttgcggaggaatttaattaagtgtcaaaagaacggcaatagaacggggactttcgaaatgtatctgtatctgctgcgacggctttgaggtcttaattggaagctcgacatcaaaatgcctgtggggataactgtcgaatagaactccgtagagtccgccccgctatcatgtgatcgatccaactacgtttatagttggcgatagaggcataatattggttagcagactgtgcttcatcccgtgctgatccatcagactgtgcacgtctttgtaccagcaagatcccctcatccgaaaaggacatttgacatgacaagttaagcggtaccgttatttcattctatatcgagcggttcatataagatcaggttgtaaataacaaatgcaaggctcataacaagaaaaagactttccatgcataacgcttagtttgacaaaaggaggctggcaagccaagacaagatataagcaggcttacagctccctgtcccaggacgaggcatcactgtctgtctgatctccttgcttctgccacgactggaacatgagagttgccacgttccggcccatcaacgcactagtctccattgtcgagatgaagctctcgatgccacctgtgtaccacacacctggagctagaagagtctcctcaaaggtcactcgcggatacagaagagggtatgggttccatagcttctcatggaaccagctgatatcgcctatcgataggtctccaatggtcgtattgctccccgcaatctcactctccagccccagaatctgggcaatgaattcagccgtgggccgctctggcgagaagattttgtaaacataatgttgctgtttgtctttagaacccgcaacagaatgatctactcttcgaagtgtactaatactccagaattcagtgaggccaacaccatctgggttcgaacccagatcaacgcccttgggtagagtggtcagaatagtctcgggcgctcgagcatttgaatcgttcagaccaaaatacttaggtgagatgcggtgaggggatgcaaagagagtaacgtgcaaattgacatatggaatctcatctggagtgtgttccaagggaggggagacggagatacccgagtactgcaaaggaccggcaatgacaacttcgtcgaatagctcatgctcggagctggtagcggtgttgacctttgaagagacccgtacagtcccatcatcgttgcgtgaaatctcagtggcggtggtattcactttgatattcacctccgaggccctcagcgcgccatcgaaaatgcgccaatttccaccctcgatagaaaccgctccatccgtagccatacagacgacagattccaagccatgaatcagctgcaggttctgtccataattcactcgagtacttgcttggatgatctcattcgcaaacagcgagctgatttcatttgcccggagaaacacatcgccaggagatgcagtagcattgatcaagtcagccgcaatagctgcctcagtaagagagctgaaagggaataaaggctcttcataaaggcggagaaacctgccaacgacattctttaccagattctgagtacgcagaggcgccagtccataacgccagaagagccggccgatattccaccagctatacgaattcgtcaatgtgaaaacgaactgggttccatcccagatcccgatactctcagcagtctccctgggccgtgcatggtcagcactattgaccgtcaggccgaggtcacgggaagcgttgaccaggttgtaattgatctggacaaaaatggaagcacccagttcaatggggtacgccgggtcgtcgaatacattgactgttgttgagcggccgccaacatatgattcacgctcatagactgtgatttccacaggaatgttggcttcatctgccagcttgcgcagttgatatgcagcaaacgagcctccggctccggcgcctatgggagtatcagccccgtatggaactgtgttctttagagagaggcataccgattattgccacacgctttggggttgcactggcggcttctcgcagttgctcttgttctgctgcattgccaaacgagacgagtagggcagctaggatggagtacagtaagagagggatatgccgtggcatagacggccacattattatggtagcactagaaaatggcagagctaattggtagttgaacagtagatactgattagccagagatcaatgtatttcaagatatcatcagatgaaggatcaagggcggaggtgatgccatccatgagtctaatttggtagtcggcccatgtcacgctagtctcttctaggactagtgcgtttccatatcgcttatctttttgaggggcatcacagttttgattcacttaactccgaacaattcaaaatggattcctatgacagtgactccagtgtcgatgaggacttcaccgataccggtgtgcttctaggctatgctgctgaggatgtcatcgaggatgtaatcagccatcttggaggctggccggtaagttaccacgagtgatcactttgtataagcaatttcaactaaccgctactttggttcagaaatggctcgatgaagcatccccagcacctggcgatttcgccaattgcaaagtctgcaacagcccaatgctgctcctcctcgaattgcacggcgacctgcccgatcacttcccgactgatgaacgacgcctatacctattcggctgccccagaaagccctgcaaccgcaagccaggcagtatcagagcattccgcgcagcgcgtaaagtcgccgtcggtggacaaaacagacaggttgaaacgaaaacagaggaaacccagcccgtcgcaccagaacaacccaagcaggacctaggagcgagcctgttcggcgcaacaaacttgacgagcaacgtatcttcgaacccgaatcctttctcatccgcttcgggcccaacacccgcaggaagcaaccccttcgcgacaccagttcaggcgacagcacctacagccgagaagcccgccgtgtctgcaaccaacctggcctcatctttcgccgataaagtgcgcatctcctcgccaccgccctcagccgcgacaaagaaaacaccggaatcaagcacagcggctccgtggcccgcgcagtccgcgttccctccgccgtacaaaaatttctacctagacgcagaatacgaaactctctcccggccatcttcacccacagtgccagataatgtgcaaattgaaccaatggaggaagaaggtgctggtggcgcggagctcaaggacactttcgagtccgaactcgacaaggactttatgaagttctcgatgcgcatcgagcacaacccggagcaagttctgcggtatgagttccgcggtacgccactgctgtactcaactggtgacgaggtcggtacccggctgcatgttcacagtgctcctggtgccaagatcaccacactcggttcggggaggatcccggcctgtgagtactgtggaagccagcgtgtgttcgagttccagcttgtgccgcatgctattactatgcttgaggaggggcgtcctggtgttgggcttgggaaggatgatgcgggcatggagtggggcactatcatcatgggagtttgtggtcagaactgtacgccgcaggagttgggcgttactgggtggcgggaggaatgggctggtgtgcagtgggaggagttgagatagatgtggatgtggatgttttgcattagatgtgagggctttgcctaccctaggttgtacatagcaatgtgaccaggaaaacggagtattttggatgtattgccgagagatcgccttgttacttttttgtcacttttgatgcagagaatggctctcgtatatcgaatgtttgagtctgcccacggaataggagtgctgcgttggtgccatttatgcgacgatgattctctatgtgagttttgctctctttaagtggcctcgggagaagttctgtaaaagaagttctggagattatatcgatacagatgggcttcgcccatttgtcagtagcaacttagacatagttagggcacgggtacctcaaccggttagtttatatacataagaagtgtgttagaaccagttacggaacttccttggttttctagcaatctaggttgtatgtatatttaaggtagaggacatgataaataaacctagtactatcatcttttctcttaaagtctatatatccgagaaggattgattgagcgcttgaggattctttgactgggcgggtccctcctgttaattcagctgtattctgattcagctgggaataaggtcatatctgaatgttgtcatttgggctgataactatccttcgcaaatgacactatgtcgtgctgtatccccattgcttctctagaactggctctgtatgatttttgatattggcagcaaagccggccttatggagacacgactgaagttatgctaatggtataaacatcacatctatctctcttcctcatattacccagtgcaaatatttgcacggacaagtaaaaaaaaagaatccaatacagacaagagaaatagaaaaaaaaaaaaacaccggatgcgccaggccccgactcatctccgagcccctcctccatgcgaaatctctcatcggttcgtcacttgatcgggggtgggattcatgaactcatgtcatggatggaaatcaaacgatttccctcacacagctttttggagattttaaaaaaaggtgatgcgaaaaaaagaagatcaagaataaagagcttccgcagtaggcgcttatgcgggcaactcgaagccacggcggatgacacgaccgaactgctcgataccgacgtgctcgctcttgacctcggagcgggcctcgttctccttgttggtaggcacgcggatgacggcaccatcgaccttccagccgcagacgtcgacgacgaacttgtcgagcgcgtcacggctgcggacatcgagccaggactcgaggttctcggcggtgatggagcggaaggtgttgccgacctcaacggcgatgcggatgcggacgagttcctcgaagccggcaacgtcggcggtcaggtctgcgtacaggtcgtccgagttcagagtggaccagaactgggcgtactgggcggactcgaggagtgaggacaggcgggtgagcttctgcacggactcgacgaagtcggaggtctgcgaggcggagtgggcttcgttggtggtggggaagggctgggtgtttgttgggagcagagcaaggcagagcgagaaggcgggcgaggggaacacggtcagggccttgaccaggatgttggtcacagtgtcgggttggataaggtgggggttgaactggaaactggatttttttgaagagtgttgttgtcagtttggattcgcaaattttacgatgatttaggtaaccaatcaatgggttcttcacgttcagtatcttcaatttctcaacattcccaagtatattatgggatgtcaggtaataggaaacgtttttaaaagatactcatcatagtggagctttccaaatatgattttcgcaatgcaatgcctcgctaaaagaaaggggtctaactcacagcttcagcagggccaagttggcgtagcagtcgaatgaccggtcctcgcactgctgggacacatagtcctggaagacggtggtggtctcggggttgtaccgatcgaggccattgaggattgcctcaatatgggccggccgggtctcacacttgtcgaaggcgaccattttgatattgctggagggaggtgggaggtgatgcgggtcttttgtctctgctgttctttttggtgggattttccaaggtttgattgtggccgtggccggattaacctagaagggcactattacccggaattcttccggactataccacacatttgcaaacaataatactcgattctccgaaatagaaaagtggccaatggccttagattgactcgtgttcaaataatacatagaatacatatctcttgaatgcctcgtgcgatcgtgacatctcaatcataaattagccccagtcccaagaatggaaacccgctagagacgtgctcgaatcgaactccgtgaagatcgaacgaggtgcccaagagaagaaaggcatgtcccttcaagaaaaaaaccgaaaacgaggctggtaaaacaagaaactccgttccgtgtctgtaagacgccatagtctatgcccatgcccatatcgcaaaaaaagaaaaaacaaaaaacaaaaaagcaaggaaatgccgaatcgtatgcaggaagcaatgcagaaatcggtcgaaacaccttgccaaccggcataaaagcacaaaataaagcgcaaaaacaaagaataagagaagctcaaggttgaaggtgcctgaaacacaagaacaaagcaggcgggtatctcaataagaggttcatgcaaatgacgaaaatattatttcaagccatgacgggacgacgaggagcaatgggaatcgccttgggtcccgccgagatttcaagggtagacatgtcgatgtcgttggtgtcatacttctggccgttctgtggctgtatggccttagatacgaggactggctgagaagcactaggaatttcatcgtcgcccacggtgctgcagacaaagcgttcctcgttgagagggatgccgccaaacattaagcccagctgttgcagaagcgcgacgaaatgagcatgtaattcggtaaagatgtattcattgccgacgatttcggccaaattacgggcacgaatctgaccggccgcgcgccggcccgccggggccatacccccgcccgggggggagggggaannnnnnnnnnnnnnnnnnnnnnnnnnnnnnnnnnnnnnnnnnnnnnnnnnnnnnnnnnnnnnnnnnnnnnnnnnnnnnnnnnnnnnnnnnnnnnnnnnnnnnnnnnnnnnnnnnnnnnnnnnnnnnnnnnnnnnnnnnnnnnnnnnnncccccggccggtgaggaaggatgaaacgggagggtactggcgaccggcctgtcttgggttgttctgctcatcgcgggtcttctcgtcttcctggaagcgttcagcagcgcggacaatgctagtggcgatgcggccgaatgcacgccagatgatgggacatgcgcggaatgctcttccggcatctcgtcccgccaatgcgaccagtgcataactacgtcgcttgccgcgggccatggggtccggcagacggaaaatgtaggcaatggtgtaaccggcgactccgtcgccgaagcagatcgggccggacgaaagtccccggggcaggagctcacagctcagggtgcgaatagaggagcgtcggagaagagcatagtcggcggggttaggcggcccgcgctgggagagataggtatggatgtgagtgtggcatgaagaatcggaggcaaccgaggcagagtgaagtgattcgggaggagaagcatgagtgtgatagtcggtctcatcatccacctcggaatggttgttgccacatgagtaaacgagctcgcgcgagcgaagcaccggactagtagaattgcctttggcatcgcgacttccaggcgccccgggtggcagctgtttgctcacattttctggcagagacaagctgcaactcgcgcaggtgtcgccattcacaccacctcggctggatttttcatcgggtgaggtcggatgtcccttgagaaagtatgggtgatcttcaattctaggcgacttggactcggcagatttattcgatcgagtctcatcgaagcgcgattcatgtgaagccggggtaccctggggagagtgatcgggttcggggtgacattgcggacatgaaaaaggtaagacctgcgagcatatgatagaggttggaccatgcacctcgcagaagtgcgtcaaagaaagctgcccaagtcagtctaagctcacggatatactttttttatactcacaatgaaatccatggtggacctgatcaagcaacaaccagcatctttagtccattgtcccaaggcatgctgtgactggataatgacgaaaggccggtatgcgggtccacacagcgaccagttccaggggggggggagaaggttaaaaaaaggcaaactaaaaaagaggcgaagaaagagaagggggtttcgagttgagatattaaaaagaaagagaagtacggagtagtggagttgtgatgtgataaataagaagacaagcaataataatcgaaggggctaaggccctgggggggaacttcttcggtggaagcccgggagttgcgctttcgggaacttcccaaatggaaggtcgatggaagcaaagaacgtcgaatccacttggtttcggattttcgttcgtttcgtttctattctttcgtcttcgcttcttatatcttatatctcgctttatctcttcccttgaatggctgtacttcactctagttacaccacccttccggatgtcttccgatcacattctttcatgctcctctcctggattgctgcatgtgaaagtcattataaaatcgggccgaccattaatattcctgggtttccgtgctttgcctagcgccttgtcccgaggggctgttctcgtttgcccttggaccgttgcgtacaagtggagatagtggctgcaaacaggggctctattgtggaaatatgtgtggtaccaatgatcgtgcagagaatttgactgaatattacggagtacatctatgatcttcatcttgatacatatatcaatccatacaatctatatcaatgaattcaaaggtttgatatgatctatcagaggaatcgacaggggtaggggctcaccgcttcctctctcagcctcctgtatagatgtagcttctcttttttttttcccctctcacttctcatgttactcaaaaatcagcatgtgtcaaatcagtcgacagccgtctctattccagccatctgcccggtggatttctcggggagtaatctggagataactccgtgttaggggcacggcaaggaggtaaagggaagaattccctgtcctccgatttgctggtggacgtcatcgtattggatgtgtacaatatacataatttcatgggctacactccctgacctctggacactggacagacgatctttggatcccaaaaagatgctcatctttccccaagtgggacaccaaacagttccgtggaaaagtgggaatcggggccgattccatgttagcgtgttcagcagggacctaaaactttgtgttgggatttccaagcctccgggagtcgtagggtcatcgttgatatcccttttccccgttacattatcgtctgcgatattcaatatactcgaggcgaaggatctccaacataatccccctttcatccggatgagggtgttcttcggagttaaactccgtcaaatattgactttgtattccatccgtccaaatggcaaacggaggtttaatgtgcatctccgatcctatttcgtccaccgggtgagcatatcttttccaggctgtttccaaaagatgaaacagaccttgatactccgaaataggagccccggcattgggccggattcctaaatcctagatccttgccgacatacgaagccaggtgacctccgtacggactacggagtagtcgcacactaagtacggattactccgtacgctaggtggcactagtggtgtactccatacaatgtgtcaaatcctgtcgtctagttaccctttagtgatataccccggctcattccttcatcccggctactatgtcatctcaccctatcacgccgcgggcattattgatttcccatcgcttttaatttaggattgagggatttaagatactatttgtaacggaaaacgaaaggaaccgtaaacccactcgacaacccactgacgagcggatccccttattaatctcgccaccaaataagcacacgacacttgaccggcgtttggcaggcggagtacgcagtaccgaatatctattcccgcactgagggcggaatgggtttccctacgttatacagaacgtagtggtatacccacatgggcatggactcgactcacataaaacaccgactcatgtgttccacaatcaagatctactgagtacacgtgagacaaaaatggatatgttgtattactgtataccttatatactactccgtactccgtgtaatagggttatccacccacgaaccggatacccgattgttttgggaaggtggtttatgtatttcgtacgtaaacgccaatatggttttcatgcagaagtggatcggcaatgagacattcttatattggcccgaggtcaggcacaatcggcaagcccaaacacttggctcgatccaagacattgacgatctagccacgtgggatttttaaagtactagattgatgatcagcgtcatagatgcaatgcataggtaccacatacattcgagtatctacaacaccgaacaatatacggagtatgtatacgatcattggaatcggctgcacggccttgataatagcaggtcacacgatctggtcaccactcgactccacagaaccgttgctccatcgacaatttcgccctaatatatatgggtactacggagctctcgccagctgtcgccaccctgcgggtatgccagtctgcatacatagcttatcggtttgaataatatttatcatgcagctttagctagccccactagcgctagttggcaagtttattcaagctgctagggaccgtcccgttgaaccatatatcctagggagtggaacgtgtttagtctgtatgtggccaagttctatgtgaatttgcatatacacatacatagaaggcgcgagggtctagcagacatttaatttatttccgacttaattacatctttgaaaggatatgtaattgatccgtagttaacctagagaaaacatatcaaggcaccaaggcctcattagccgccctaggcggaattattgttaagcccgacctagatcacatagttgaatccacctgaaagatggaatcataatgtttttttttcttgtttttccatcaatagccagcatggcacttgaaggatgtcggttcggccgcgtcgccaaccctctcatcccctgcggcgggggtgtaaggcgatatcatagacctcggaaaccatattgactagcaaccacaataggaacaacccctgtctttggtcgacggatcgctttgtctaactaaacgagacacttcagtcgatcgcatggggtggcattaaatccattgcagattcagagtctgttcttcctttctcgggcatgtcgaatgatgactccgcatagctcgagcatgtactatcatcttcaaggtcgatcatatttgggcatgcgcatgttcatcattgacagcatattgcccgccggaccggaggctccagcttggccctgaagactctccagcaaattcttagcgaggttgatgttgatgttctcatcctcgtcatcctcattggagatcttggcagcctttcctttggatgtacttgcctcagaagacaattcttgcgggcgccggttgagatcgagcacacccgtaccttgcaattccgcctccattcgtcgggaaagctccttgatctgctccgtgtcgtcttccccgtccgagtcaagctcttccactcgtttgcggatggaatcgggtgcagagggcatgcccatcatttctttcatcattctagagaattcctcttcgttgaatgacgcatccttatcctcgccttcactgtcaacttcctcgtcatcatcatcatcgtcgacgtcggaatccgactcaaagtcatcaatgaaatcggcaccatcgaagcccgctgagttgtcattcaggaactcttcaaatcgagccacgatccgttgaagattttcctgggcaccagcgtcaccgaatttgccagcatctgctccctttccttcacctctccctttgagctctgactccaaatcctcatagttgatatccagccatttttcatcgtcttctcgcttatcccaggtttcttggatttcttgatcggtcggaagggtttcatcacctgtgtccacatcctcgagcaggaacttcatttccctgactgcaggcttatcttgattttgggggtcgtacagcagcatctcgaacccacacgcaagtttcatccccgcttccgcccgctcatatgctttgtgatcctcggttgggggcaatttgcccgcccaggtctttggcaccggaaattcctggcttttgagttgcgcatatccgacacgggtaaaccgaacactaacgtcgaccaagtcatccggcttgaaaacaaggtcggacgcatccttcgctcgtaatggtcgcatggcgatcggatcacgaacatagaacgcctccactgcaggcgagatatatgctggtttttgatgtaggagaaatgcgaccttgcgaggaattgtaatgatggcagagtggaggttttcgctgatttgctgagggtacttgcgcagacggtaaaaggcctcttcttgaattattgtcgagcgaagaaggcgaccgggttcattctggataatctttcgtgcctctgggagtgaaattttctccgtgacctgtctcttcgcctcctgcttaggcttgatgattcggagctctccttggttaatccacacctatagattggctggttagcatgatatcttgaataagccgacacgaatcaacaagccatagctcaccctattgtctgcgacatctggctctatccatgctgggagtgttcccgcagcctcaatcagaagaaattcgccatcgccatccgccactttgacccagatatctttgtgccgcttagtcagttcacggagtaagtacacaatgacccattcatcttcgatagagtcaccaaaggtggtgcgaccctgtagtgaggtgattcctaaatcccgcgacaattagctttagcgctattcagagagaggtcaagagttctgtaccatcttcttttgtaatttccaatcgaaaggcatcacgctgccaaatgtaatctttgagcaagtctttggttaaatcggctgctgtacgttgcacctccaacaatcgcgcccgggtctcggcagcttcatcgataacggcgggggtggggggcgggatatgataaattgagtattcgaccgcgtcgtcagggagctctggttttgggataggacggaaggttgattggaaccatgcgagatcctcctcagaagtcatggctgatcttatgctcttaaagaccagagatgacctcatgcattcttctgatagaaaaaagcaaaagcggcgaaattcacatcccgtgatccatacgctaatccccattaggttagaaatcaacagaggtgtccacgctaaacctaacgcagccggggataactcgcccaaaacacgtctgtgattgtcaggcgtgaacttcctgtctcaaattcgctcctgcccttattgacggtgatggttacgcgctgaaaggttctggcccacctctccctgttcaaatatggccttcccctacatcgacacaccgcgcaccgaatacgacggcaacgcgacttatcttacaactggatttcgcagcgcggggcgacataacctctctgcactcgattctctcgagaattcgttccaaacaccatccaaggacaatgatttgatcaagggtttcgacaaacgcgtcactccgcgcgccggtgcagcttctaagtcaacgagaagcgcgttacgacatcttccagcagcagcccccgggaagggagagtttactccgttaatgaagagcgcgacgaaaaacaaccttttgagaaacatgtctgcagcccgagcaacagacggtccgaaaacaccgggatatcagcgagagacccatcgcagcaacgctcacacacccggcttgcctgctatggacatgtctgatatatacgaggaggatcggacaatggaagaggcaactccggttccacatgcggcaagcagtagtccgcaaagtacaccattgccaggaggtaacgggggagtccttggtgacggagggaataatttgtcgctcaaggaccaagctatggtatgatacatatcccaaccattgggcttgcacgcaactttcttcgggctaatgctgatgttcataggccattgatcgactgagcaaagttaatttcagtctgaagctgaggattcacttcatggaagagcaactgcaaaaagctggaccggaatacaataacgacgccctcaaagagaacagagagctcaagctcttgcgagtaacgatgcaacgcgatatttctcgataccggaagagcctccagcaggcagagaaagatcttaaggactaccagctacagctagtggagttgaaggagaaatcatggagggagcaagcggatcagacggtacaacgcgaaatggatctgatgcgcgaagagcttgagtcgcgtgacctcgaactccgcgaagcgcgcgacgaattgaggcacattaaagatacccaatctcaagagaccgataaacttcgcgacgatattgaggatttagaagcaagcgtgagggagaaagatcggctactcgatcaacgcgaagaagagctcgaggatctgaaacgtaacgccgaggagaatggcgcagcttcagagctccagcttgagctgaaccgtgccaaggagcagatgcaagagctccatgatagtcttgcccaggccaagtccgagatcagagagtcagttgatgccgcaagggaggccgctgaagagaaggctcgtgccgaggaagatttgagagaattgcaggacgaaatgtcgaataagtctttcaccaccaaaggactgagccggcagatggaggacaggaccgaaaagctcgaacaagagatacacgagctgcaacgagagaatggttctctgagaacagaactggagagtaaaagcaaccatgcgactctcctcgaagagcgttatcatactattcagcacggcctagaagataacgccaaccagctggctgaagatcttgctgcaaccaggcgtgatcgcgatcaagtccggcaggaccttaaaactacttctgctcgactacaagaggccttggatgaactccagcgtggagtggacgaaaaggaacttcttcaaactcgtcataatgcgctgaccgacgaatcggggggactacaaatcgaactcgaccgtgcacaatccagaatccgcgaacttcagaaagcggttcaagatgccacatctcgggctcaggatgaagggcacaatattcgctggcagcacaaggcagaactcgaacggctgcaagaggagatcgaaaaccttcaccacgaaattgaggagaaggagggacaatttgcagtcgatcaaagtcgctgggaaagcaccaagcggactctgcaatcagagaaagcatgggcagaaggccaagcggcagacttgaagcgcactattgacacgcttcaggaagccggtagcacatactctgggaaggagtctaggctacaagaggccattgatagcgagaaaaagcgctacacgcaagaaaagtctatgctgaaccgccaaatccaagatctcaaagacgacctcgataagacaagacgtgaccttgatgaaaaacgagacgagcttcttacagcgaagcaggatgctcggctatctagacgcgaagagcaagcacttgcagagaaggtgcgagccctagaagacgaggtgatcgttttacaatcgactctggcggatgagcaagagcttgccaaggatcgacagaatgggacatctgatctagacaaaaacctggaaaagtctattgccgagaggcagaagctccgtgatcagcttgcaaatgctcatgtcgagatatttgacctaaaggcttcggcgcaggagattgaggctgaacgcatcgagctccaagctcaactcgaccgagtccagaacgcagatgacaccacccggtttgatcgcgacaaacttgaactacgcaagactgtgacaagacttgagaacgaacttaaagtactgcgagacaccaaatcgtcccttgaggaccagcttgtctcagaaagtgaacgatttgcagcagaggagggtcgtctttcggctgaaatcgatcgtcttcaggggaaattgcttgctaattcgggtaatcgagatcgagaactgacttcggccaagacgaaggcacagcgcctagagcgtcgcgcccaagaactggaagctcttcttgagcagcagcagcctgtgatggagaatgaacaatctggtacacatggggacctatctttacttcggcacagcctggaggaggctaggaaacgcgaaaagatcctcctccagcgtgaatccaagcaaaagtcttccgcgcaaagctataagtcacgagtagaagaattggagaaggatcttcatgatgcgatgatgaacaaattcgagtcacactccccacataattctccatcaaacaagcttcacgaagagctacgcagtctacgaaaacaagtcgctgaagcgcaccgatcccttcagaaggtgaacacgaagaaccgagagctagaacgtgccgcgatgaaagaagaggaccaaaaagacttccatgagctccttagatcctccactctcgaagccgaatcattagccctgaaactttccgaacgggaagcgcgcctgaacgaattgaaaacacatgtgcggcggattcgcgaagaacgagatacccacaaacgtgaggctgaagcagcaaacaaaaatctggatgtgttacaaagacgccacgacgaaatcctcgagaagaactccctttctaagaccaccaacaagaccaaacatgagaaagagatccgaggcctaggcaaggaaatcatctggcttcgtgctcgcctgcatcgtgaggagaaattccgccgtgatcttgcctggagcaagggcttgatggaactgggtgaacgcgtccgagttgcatggttcgtaatcccatctctgccgaatactatttgcaatatagctaacaagttatcaacagcaacgatgccgatctccgcatgatttcagagatgggcgtgcaagcccgtgaccgagctcctgtccgcactccacgccataaactaaaatccgccatatcccttgtgagggccgctgttcgcatgcaaaagatgagcagcgattggaaacgcaccaggaaactaggcgagggcttgaagcgtgccaagactgaaatgctcaagcgccgtgatagctcaaacaagagcttgcttggccagtagccctggagatcggttctatcttatgtcattcgttctgattttgtctcttgttcttccagcgtcgacattctgtcatgagagattcccccgacatgtcttgcaagtatactagtttttttctcgacttgttttgtgattctgtctaccttcttttttagagtgttttacagctggctttgtgccggtttgttcgaatcatttgtgtatagtcatcccgacaaggaatttgatgattcaaaaaccgttcgttactcatttatgtagcgtctgccagtacagaaattgagccttgatgacacctacaaacatgggcgaaagaatcatacaggttgtagtcttgaaagcagtatgtatgctactcgcacgctttcctatgacggagacacttgcggggatagacacttgaaatatttgctcagccaacgcctcgccgttgccaaaagtaattgagaaacgcttctaaacaccgaaatcttcggagacaccgaccaaaaacacaggaatccgagatgaagcaagcgttgacatgggcacagataaagcatatgagaaaataaagagactatgggcaagggcatgggatattcagatttcgtcctctctggacaagccaaggagccatggttttatgctgtcgatgaggtagaaaaattcacatttcggaggccatgatgggaaggatatcgattctttcggaagatacgatcaggcgccttcactaccgaattcttgggtccattcagcgttcctcgtgagatcctctccgctaacggttggccgggagttcttgactgccttgacgaaatccttcagagcgagaggtggctccaaaagcttatctgcatcgatatcgagccagctcatttccactgcgccctcatcccctggtgagcaaggcgtgactttctctacaccctcatcgagtacctatgatggagtcgggtcagtcgctgtggtctgggacggtgagaactgagtatacataccttcttataatgtgttgctccttgaatcttgcggattggctgcattagtgcatcctgcacgcaaatactaatatcgctaccggagtagccttcgctcagatcggccaattggcgatagtcggtctgggtcatttgacacggcgtcgagcccacggctagcatgaacatcttcattcgtgcattgaagtcgggaagactgatgtgtattcttcgctggaatcgtcgccgaatagcagcatccagttgccaagggatattggttgcgcccaaaatcaaaacgcccttcgagtctttgccgacaccgtccatctgtacaagcaattcggtcttgatacgccgtgaggcctcggactctccttcgccacggggtccgcacagcgcatcgacctcgtcgatgaagataatcgcgggcttattctcacgggccatgttaaacaactgtttcacaagtctagacgcgaattagtatgcaactctcgaaactcccgtagataaagatatcgcatacctttcactctcacccatccacttcgagaccaggtcactactgctgacactgaagaatgtgctgtttgcctcagttgccacggctttggcaagataagattttcccgtgcctggaggaccgtagagcaagatacccttccagggttggcgcttgccagtgaacaaatgagggaacttgatgggtagaatgactgcttccttcaatgcttcctttgcgttctccaggccagcaacatcttcccacttgacgttcggcttctccgacagaatagctccttgaagcgccgatcgaagctttttcgcatccgcatcttcgccgttgtcgtcatcttccttcctgtccgattcagtgttgttagcgggaatacataggacaaaagctcacttgctaacactgtttatcacacatatggcggtgctaaaacataaacttttgtccaaagaagttgatacataccctcccttcccactgccttgcgccacctttccatttgcgccaaccgcactcggttttttccggtcctcagcgaggtggttcttaagcttctccgcgcgatccatatattcgccggcctttgagcggatcatttccttcgatttcgggttcttctcccatttcagggccagcatgaacaactccaatgcggagtagtacatctgataagccttttcgtactcgccatcgttgtcattctcgatcgccttcttgaccgtatcaatcgcccgtcccaggaaatctgtattactcatgacgggcaatgcgggtgctgtctgtagaggtagcaagccgaccgcggaggcagatgtgataaagcggggagaggggaacaagggttagggcaatgggccaaggctggaaggataggcagcgagtgccagaagaaagacttggagcttcttgggtgtagaagaaaagaagaagtgcaaaacagtcctagaatcgagagttgatgagaattggaggggaaaagtgagaggtggaagttgttgacgggcgggatccattgattttccctcctcccacttcacctccaagttcaccatggacgcccagaaacagcttcaagcactttcggaagagttccagggactgcagaacggtatgtctctatatttatttgatgatagcaatagctgctgaccttttccaccacccagagcttgaggttctggtcgatgctcgccagaagctcgaatcgcagcagcaagagaacgaaggcgtgcaggctgagttcgtccagctggacgatgaatccaacatttacaagctcatcggcccggtattgctgaagcaggagaagaccgaagccaccatggccgtcaacagtcggttggagttcattgagaaggagatgttagtgccacttccttgaccactgtgagccaacgagaaatgcgtgctgactgagatgttacagcaagcgaatcgaaggcgagattgatgcgacacaagacaagagcgagaagatgcgctcagaggtaaatcgccctcatccaactgcaatccacaccccactatatgcatattctaacccctcacccagctcatccaactccaaagccaggttcaacaacaggctgctgctgcttcagcctccgcataaggccaaagaactcctagagcctgcaggtgaaaaaggatatatcacccggagatgcaataatatgtggcgtgcgagctacgactaggatggggaccaaccctcaaccgtttcactgtgattcagtacatgcgatatgcaagtcgtgagccccatttgggggtagcccaaggaatgtttgggcgttaaggaccaaatcccaattgagatggggtagcttggaaatgtatgatttgtgcagttgcctgacaccaaaacagcgcatggatcggttcaaaaaagatatacccttgaaaatttaatgcaatgctgtcaaaagtgatcgattgatctttgaatgaatcaaaaaaaatatatatttgcacgatcttttcttaatgccttctagtgagaagatttgaaatagtattcaatttatatcgaggacgcatgtgattgcactcaagaaggccatctgaagcacgcaaagaagctagaggatggatgacttctgatgccatgtgtatattgacaaaattctattcgttgattcataatcaaacatttacatatgggaaacttgatctaggacttgaccagcagactggtaccggtcatctccttgggttgctcgacgcccatggctgcgagaacggtaggtgcaacatcacccaagacaccgtccttcttaaggctccaactctcaggggcgttggccataacaaagggaaccttattaagggtgtgggaggtcttgggggtacccttctcggtgagcatctcctcggcgtttctgtgaatgtgggttaactagcaatcctctttgataggaggttatcgtatttcccagaataacttacccatgatcggcggtgatgaatagaacgtagttgttcttcttgcaggcctcatagatctcaccaatcgccttgtcggtggcagcaacaccctggatggcggcctcgtacacgccagtgtggccaaccatgtcaggaggggcgaagttgttcatgacaaagtcgaacttgttctcgccgaggcgttcagccatcttatcaccgacagcagctgcactcatctttggatcaagatcgtaggtagcaactcggggcgaagggatcatatcgcgcacttctccggggaagaccttctcgataccaccgttgaagaagaaagtgacgtgagcatacttctcagtctccgcaatatggcactgctggaggttcttcttgccgagccattcggccagcacgttacccatatgttgcggggggaaagcaacattgaagttgtagtcagttttgtactgggtcatggtggtaagggagatgttcttggggtaggggaagtccggaaggggggaacggtcatagtcgcccagcagctgagtgatttcacggacacgatccgagcggtagttgaagaagaagagggtatcatcatctatacaggctcaattagttgtcatggcatttcctttcagtttggaccaaacgcaccctggacacggcgctccttgccgccaacaatgatgggcttcaggaactcatcgttctcattcttctcgtagcgctccttgatggtctgtagcgggtccgagctgtcctcgccctcgccagtgaccagacccttgaggccaatctcaacacgctcccagcgcttgtcgcggtccatgatatagtagcggcccacgatagtcgcaatcacaccgacaccgatctcctgggtcttgtcaagcacttgctgcaagaacttgtcggcgctcttagggtcggtatcacgtccatcggcgaagaagtggatgaagacctcgggaatctgcatgtccttggcgacctggagcaaggcgaataggtgagcgatgctggagtgaacaccaccatctgagaccaagcccagaaggtgcagacgtccattgccctcctttgcgcgagtgaaagccttgacaatgctgggcaccttgcccatctcgcccttcttgagggtctggtcaatgcgaacactgtcctgccagacaacacggccagcaccaatgttcaggtgaccgacctcactgttgcccatcagaccctcgggcagaccaactgccagcgaggaggcttctaactcggcatagccttgggcagtcttggagttgggctcagcgaagccggacatgtgtggggtatcggccgcggcgattgcatctccctggggtggggagtcggggcctgcaataccccagccatcaattacaactttgagacgtacattagcggtatatctttttgaggacctgggtggcagtcgaccatactcaaagcaactttttggtcggccatagtggggtttattatggtggctgaatcacacctagaattatacgacactggtcaattgctgggccaagagaaaatttgaacgattcacttacttttagacggatgtttggagaagaagaatttgaacgactaacgcagataaaaggctgccggtgaggggcatgagccccgacgtcaccgtcaccgggtgccaggagcgtatttgctgatctaatcatatgttgcggccgtaggagcgggtgtgtcctccgactcttccctaaaaacttaccccagccgggatctactcgtccttcagatatatatcctcggaatcattcgagtcaacatttccgacaatggcttctcgatccccgccagtgggtactccgctgctaaaatcccctgtgcccgagacgcccttcaaagacgcgccaacaccagtaccacaaacagtaccttttccttcaccacagaccttcgaggtaatcccaccattgcatgggattctttctcgcttgctctcctccaaaggtcagcaaagcggtccatcagacgcacctggggatacaacaggtgtcccaggagcttcccaggcacagacccaacaagcaccttcgaacatccccaatggcgggcacaacggcaacaatacatcatcacatgccgtaccagaagtatcggtcctcggttcaagcgctcatccgccgctcgatgtgaaaaacctccctaccgaaactagctctgtcaggattcgaatccagaaggctcgtacagtcgtcgaagggctaccagatgtgcatcggtctgtcaatgaccaacaaagagaaattgcagaactagaggatcgtgtgagacgtttgcgctctatcatctctgacttcgggtatcgagcagggataccacatgaggacaccacaaggaccttggaagcataaagctcgaaaccagaggatctcgggctacaatcggaactcccaagttacccaggtgctgcaggattttgagattgatttattcggcgtttataaggaaataccctggtgtttttagcgatcatttcaagatagcaaaggctccatcatttcatgagctgtggcaaatctagcaattcatactcctagtttctcttctttctttttttcaaggaattcattcttgtttgaacctccagccaatctagttcgatttgccgcaccaatttacaaattttatagccaaaaccctaatccggccaactgtctccgatatcgttcggtgggttaaagttcagggcctgaggcaacggaagatccctcccccaccacttgcatttattttttccccttctcttcacctaccatcctccatatcaattttttctgtttacctcataagacagattaccatacttcatcatgtcttacgctctttccgagtcccaccgggacgtgagtatcacaactgccctcattttcagcatctagatcgttgactcatcgattatagcaaatgcacaactccctcgtggccagtgatccggagattgctgccctcatggtacgtcgaaactatataccattgagacctgcagtgaaatgcattgtctccaccagaaaattcggctgtgctaattcttctactcgtacaggaaaaggaaatccagcgtcagcgtgagtcaatcgtcctgattgcctccgagaacttcacttctcgtgctgtcttcgatgccctcggttcgcccatgtgcaacaagtactccgagggttaccccggtgctcgttactacggtggcaaccagcatatcgacgccattgagatcacctgccagcagcgtgctctcaaggcattcaacctcgaccccgccaagtggggcgtcaacgtccagtgcctttctggtagccccgccaacctccaggtctaccaggctctcatgcgtccccatgaccgtttgatgggcttggatctcccccacggcggtcacttgagccacggctaccagaccccctccagaaagatctctgccgtttccacctactttgagaccttcccttaccgtgtcgaccttgagaccggtatcattgactatgacactcttgagcgtaacgccgagatgtaccgccccaagtgtctggttgctggtacctccgcctactgccgtctgattgactacaagcgcatgcgcgagattgccgataaggttggcgcctacctcatcgtcgatatggctcacatctccggcctgatcgccgctggtgtcattccctctcccttcgagtacgccgatgtggtgaccaccaccactcacaagtctctccgtggcccccgtggcgccatgatcttcttccgcaagggtgtccgcagcaccgataagaacggcaaggatatcctttacgacctcgagaaccctatcaacttctccgtcttccctggtcaccaaggtggtccccacaaccacaccatcactgctctggccgttgctctcaagcaggctgacacccctgagttcaagcagtaccagcagcaggttatcaagaatgccaaggctctcgaagaggagttcaaggttcttggtcacaagctcgtctcggacggcactgacagccacatggttctcgttgacctccgcgccaacaaccttgatggagctcgtgttgaggccgttcttgagcagatcaacattgcctgtaacaagaactccatccctggtgacaagtcagccctcactccttgcggtattcgcattggtgctcccgccatgacttcccgtggtatgggtgaggaggacttcaagcgcattgctcgctacattgatcagtctatcaccctctgcaagaagatccagagtgagctccccaaggatgccaacaagctcaaggacttcaaggccaaggttgccgatgagagcgttcctgagatccttgctcttcgcaaggatatctctcagtgggccagcaccttccctctccccgtttaaatgggatattgaggacggagtatgagttacggaaaaaataaagagggatctgaatcaggatcccacgagttcaacatcatttcgtataacaaaagaaaaatacacgggtgcgtttttaggggttaattaccggtctgctttttcaacctgacgcgggtcattgggatatgggaatgcttttttgcatgtgaaacgagcaattgttttttttttcggcggatgggcctcgcacttattcaacagcgggctcacatgaatttctgagggggaaaaagttcaacattaattgggcgtcctatgtacattctacaatctgttctcaacacaaggatctctagaatccaaggattattttcttctctgctttatctttccaaggttcctgatacggtcctattatctatacatgtaagaataagtcgtgtaaaccttttctggttagttttgcccgacttcgagccctatacttggcgcgcgatatggccgttgaaagcacataaacattgtagcggcgcagtgccgttattggcttgtcctggttcaaatcttagataaaaagtctttcgaaaagtccaccacaaagacattactcggccgcattagcggccgaatattcttgttcctcatatttagatggagaaagagcgaaccgctacggatgtatggatctagtaaatattcatgcctcaacggaaacatctccgtgcgaattcattgttcaagatccctactccaactatcctctgaatttttgactgcatcatgctctcagttctcccaggcgcgtgaaaagctcaccatccgctcagccgcatctggctggctgagaatttcgcccctcgggtcttctccaagatcctcctcccatactgtctgcggctcggaattggccttcaggttattgtacaggcacatccgcaggtgccaacgaagcaggtcggcgctcatacgccaggttccactccgagcagagtctctgagacgagtaccaccaattcctgtaggaaccggtccgaatacgatgatcttgtagttagcctatgttcacaaccattagtatataccgacaaaatatcgtatatggaaagtctcacatctgggtcaatccctagttcgatactatcaaatagggagtggatatctgcgctgaggaggagtccattctgagcagagtatatacgtgacttcccgatctcggtctcggggagagggtccgtgatatactgctggtatccatctcgtctctactcttccatactgctcacggggaatatatgtgtagcatcaaggtcgcggaaagggtctttaaaactgcttgccctattctgcccagtgattgcacagcaaccgtctctttgacggaggctattacggaatttcgtttgctatagaaatgattagcactggctgtttatgtttttagtcatttctacgtctactttaccagacgactccattcactccggccctgggattgggaatcggggtcttgagttccggtatcttgagttccggtatcttgagttctgactcggcggggcgcatagttggttgtcagctcgattaattggtgccctagctatacgattctcagccttggaaaacctagttatgagacgtatcaaacacacttagatccaaacccatgtagttaccaggcgccaccgaaatcccactgttaagctggagtgcagtggtaccttgtgtgttattggctcctaacttataaaattcccgctcgcttgggttatgaaagacgaatgtgaatgaacagtatcgatagagcatctccggagagatatgtcgatcttgttgggcagttgggattgccagggctataacaaggctgtattagtcgcactggttcctatgaggctatcgtgacttacaggcaagaagagcgccgttgctattataaacctggaggtttaactgcgggtacctttgtgattgaagaacaagagctggcatagctgttgccatattggagctgatgaatagagaaacatagaagcggttatactccccaattaggttagcttggctctgatgtcatccgtaaattcctcaggtgtcgatgtatagaatataagtcagccagacactccatctagttatagagagaagtacctgtcagcttgtgttcccgtcttttttggcaactgacctcgatatcgggtttatatcaggatcagaaaccgtgggcttaccattggaaggggttgggggttgcctcttccgagtgtttgtctcggtataagctaaggatggaatagttagaataaatgaaatgtaagtgagaaggaagtgggagataccaatgaactgtaccggggttgcactggcagtacaatgtaaacaagacgcggttgcatagtagaatagtagaaagtcaaaatttacaccacacaccagccacggcaggtatgaaaccaaaatgccagtttatagatgataattagaacgatgacttccaaagaaagcaagaaataagagcaaatagcaagtgagaaaacgcaagtattttgatggagtgcgcaagtggtctgtaccggataccgtaccgcaggctgcagacccaacagccaatgagaagcgcgtatttgtatataaacctcacttttatcacatcaactatgcttcaacaacttcaaaaattgctttataataatcaagggattagaatatataggtgtgagatacaagatgtagggttttttgactactcgtatgtaaagtagaagtcaggcagaattaaattgataccttctatgtaaggcagaagcaggcagaatcaggcagaagggggggcggtacatttagacgtccacgtgagctccggataactcaaccttggaaggttcctcgttttctctctctctattcctctctctctcggtctcccgacattttgtttttttgctcttttcttttcatctcttgccctttaactctcgttactgcactgctttacaatccccacggccttcctgaatttggcccctcattagagttccaggctccatcgataaggacgcaatatcttatcgctccggtccctcacggagggcatatacttagatcaatctgcgtttgattaaaaaccggaaacagtgcagtacatcttgaagaagtcaccggcgaaccaagagagaacaggaccttgcccgacatggcgaataccgcccaatgctactattgctttgagtctctcctcgcttcattcgaggatcgcgagcccaccaccttggcagccgtagaggctctatgggaacagcacgaacaaactaagaagttttcgagtcttgaagagcaaattgaagaggaagatacaggccgtcagcaatccgtaaatgaactagacgaagatgacgatagccaccaatcgtcccagtcaagtagtcaacccacgaagatgaaactccgcagcatcagtcgtcttcagagccaattctctacctcttccagcatagccacgtcttcgtcggccgcatccaatacatcttccatctcactacagtcgagctcaaccaatatcaccacgccaagtgtggtttccgagaccccccagctgagatcgcctgatcagcgatatcccctgttcgtgacatggaacaccctatcacgaagcggacacaagtctctacgcgggtgcataggcacatttgaggcacaggaacttgcagcggggttgaagtcctacgctttgacctcgtacgtgtgttccgattgaatacccctctctcactacaacgctacaagcaacggtacacccctatctatagatcggactgactcacgtgcgattttgttttagggccttcgatgatacgcgttttgaacccattcctaaatctctcctcccctcactgtcgtgctctcttaccctccttgggtccttcgagccgtgtacagatgccatggactggtctctaggcactcatgggctgcggatctccttcatccaccgcggccgtcgctatggtgccacgtatctccctgacgtcgctgtcgagcagggctggaccaaagaagaaaccgtggagagcttgatgcgcaaggcaggctgggatggtggtagcagcagtactgcacggagactgctacgcggtgcaactgatgggaactccagcgccacacagccttgggaccaggtctcggatttccgtactgtgagataccagggcctcaaggcaagcgctagttattcagaatggcaggaatggcgagagtgggttctcgccctagatgacggggaggaaatcctggaaggcgcggattagaccgctttgcttcttgtcccacatctcaatgctccaattggaactgatgattataatgaccaagatgatacgcttctttcgtgggttttcgatgaacaacttttcggtctgggtgttaataaggaatgacaatggtccgagaattcacggttgtgatgagaatttgatatgatatctcagctctataaagatagacaagtgttttaaaccgagaattatccgagaattattgattataaacactggcatcattcattgtattgataataatgtgataatgcagacattgcaaaggaacccaagcgaaggaaaagcctcagaccatagaagagcagccagtgattgtcctaaatccgaatccgaacatccctacagcagaaacacggcattgacaaaagccgatacatatccatacattctaccgaggggtacggctccacaaaccagcaaccatctccttgactcttcgctcctgggcccggatctgctcctcagtctgcccgcgcgcattaccacggctatcaatctgcatctgagccccgccagcattggccggtgcaggcggaggggcatggtgctcctcctcggtgatatcatccccattgacacgctcaggcttgggatcaacgctcaaaacgccgtccatcatgaagccaccgccctcgcggagcttattgatggcacgcacggtgtcgatagcacggtgcagcgtgcggcgcgcgttgaagttcttcttgaccgttggcagcaggtcttcgcccgagccgaccttgccgctgtcggatgcctggttgacccaagggtgctggagagcttcatgggctgtcatccgtgactgcgggttgactgtcaggcagctgttgataaagttgcgcgcttcctgcgatacaccacgccagtactcaaccggcgtgaaggagtagtctgctgctaagattgcttgcatctcttcgagattggaatcccggtcgaagggtgtgtatccacaaagcaagaagtaggtgatcacgccgatggcccagatatcgctggaagaggatggctgttagtaaaagataaagagaccgtaatgtgatgacttacactggcttgccatgaccgctctttttgaagatttctggtgccatgtatcctggcgttccgcaggttgtagttaggacatggaactgctcctcgtccatgatcctcgacaatccgaaatcggcaatcaaaagatcggcgttgtcttctggcgtgcggaaaagtaggttttccggctttagatcacggtgcacgatcccgtggtcatgcagataggccacggcagagagcactgcgcggacgaggtctgcagcgtcagactcatagtagctgcctttgcgacagatgcggtcaaatagttccccgcccagcgcgagatcagtgacaagatatactagagagcactcgttagtgagggtgtagctggagctatcatggaaacacacaattgttcatcgtctcgaagtagtcgaccagtgtgaggatgttctggtggcccagtgacaccttcttcaataccgcgatctcattccggacctgtatatttcggaagacgtcagtccatactcttgtcttcgtagtcgtagttctaccggcatacacaccatatgctcccgcccggacatgagacgcttgttgatgaccttcgccgcataatagcgaccggtatcgatgtgcacacattccttcacaacagagtacgaaccagcgcccagtgtcttcccggtcttgtatcggcacggttggaccttcggcttctggccgctcgggggttgtgccgccattgcgaataaaaccaagtgcgggatgcgcgacgcgaattgtggggggatggggaagttgtgcgatgcaaagcgtgagtgaaggattgagcgcagtggtaaaggagttcgactcggtgatgcgctatatatgcctatccttatgtacctgcgcaatccaaagtcagccttgccgtaaagtggcgcaggagtccagtgcgaagacctaaggtgagagtgcgcaaaagatactcacagttgggcgacaaagcctgattacagctatatgggcttatggtttcctcggcggtctttgatgttttccgaggggctgcgggggtttgaagtcgaagatggggaatcccgttggcggggcggctgctgaaacgtcagatgaaactatcaaacaactcaactccaacagcgttggcagttggaatagaaaaatgaatgaatagaaagttgaattaaaggccgagataaatatcaacggcgcgattataggacagggcatttctgcccagttggctagttacatttgccccaacaccagcccaatgcaaaacaaagaaaactcatagaaaatggtacattcaaaatcgttccagcacatcctcgacaatgtgctccaatagttgtagcttgtggaatttggctacgctctccaacacttgtagtttcttctcgatctccttccgatcaattgtcgcagtccatgtaccactgcaagaacagtgctccatgaaatcactgatcttaggattattgcacttcgagcacttgatatcctgcgtctgccattcaacaacaaaaccatggacttggccaatgagaaattcttcagttgccagtcggtcgtactcggcatgacagaaagggcatcgccagggctgggcagatttgctggcttctgagctggcatcaggcaaaacatcttcgtcgcgacagaggtcgagatcccgaataaggcagcacgagttgcaggacatttccggcagcttcaagctaccactagggttctcgaatcggccctccttgctgaattctcggacctcgaaaagggcaagaagctcgcgccgcagcaaccgggattccagggttgttgtcttggacaaactcagaacctgcatcagcagtttggtcaactccaaggatgggttgcgtttgtccttgcggccgactagaactcctggtaaaacggggaaggcatagtcggatgcaagctcagggtggagcatctcatcgcgttgtctgcggatcaaccccgagatttgcttcttcaatggctttgagaatcgatcagagagaattgcagtgatctcctcatcgtctgcttcgttggcccgtccgatgggaatctgtgttggccgaggagttgacagatccccgtcttcgagttccggccgtttcaggccgtgcatcagctcgatgtactcgacaatccagtcatggaagatagtctgcatgggcattggcaggaaccggctaagctgccagtgcatcgctgtctcgaggtcctgttcgtcggcctcagtgacctctcgacagcccttgcctccgtagttgtattcatcataccaaacgaggtagtcccagtactccttgatctctagatcgataaagtggaatgaagggttagcgcggattgacttgaggacatactggctgtaggcgtaggcgttgccgacctcggtcttggtcgtttggagaaggaggcgtgtagggctggcaaagatgacgtgggagccaacacgtctgaactctgccatcaatctctggaatgacctccgtgacagtaatcgcacgtagttgtgtagagacctgtcatagagacaggacacagggctttccacccatcgaatcagatgctggaccataatatcggccatgctgttgcctgcacaggcctctgtccaccaatgtttgaccatctctcgaagaacgacaacgccggcagaggcaaatgctttctctgaatagaaaacaccagtatcttcaccgtctccagaaggagcaagtagcgtatcactgccgtccatttcgttgatgatagaagatgtcagaatcgtattgatcgacaaattgcgaacctcgagttcaatgcacactgtggagtaagcacctggtacattgacagatggcatattgaccttgtccaaggcacctaggatgtcatccctttcatagcccgcgtgatcaggacgcgggcctgatgaccaccagagcaccacatttttttgttgcagccgtctagcgtacgagatatcgatgagataccgaggatcctcactttccaggttgcaaagcggaacatcaccgaaccgagcgagcatggtcaagtgctggatccaagaagacaagtataaatagcgcgtgactagacgtcttgcaacgaatgcctgccagccaagtgggggaagttccatatccgaagcttcgggcttcacggacaataatggatactccttcaggatcggaatatcgtgacacaggcggtctttttgttgggattgaatgacaagaacggcaggctgactctcatcatttcgaatctttctgatcagatcaccgacctcaaggtgagccttcctgcgcgtcatcacttgcgtagttttgaaatgaatattatcctggtagtcgaacgcatgctgcgattcatcacctgatgcagcctgtatcttacgtgtgagaagctcggtgtagattttatcgacgttgggaagaccctggacatccctcgtgcggttgagaacgataatgtgcgcctcatttttggcagtcgagaatatcgcgaagacttgtctatccccagagacaatgtgatacaggtagtggaacactaatgacgagtccatcagatagggctgctcggaagatgtgtgaagtaatgtcgaaaggtcgaaacccttgtccaagccgtcacctaggacaccgcgttgctcttcatcgaaggtacaatggcttcctaacttgagcactgctcgagtgcttagcgggatgtttccctcgtaaacaccctcaacgctagggtgctggaagagaatatccatcttgtcggcttctgctagataattctcttctgacaaagacagcttgaacaagtaaacagagggatgcccgttcggtagggtatggttgaccttctcgacttcgcagtctggaacgtcaatgtccggcaaagagtcccgtttcaagtttaagaaaaattgccgtggaactctgacactgagggcatggatcttttggtcaatcaacacaaacgctcgcacaactcccggaacgcccgtctcgcaaagctgcagaacctgccatgtgctgatgtacagcatttgggcttgattgcggaagaaattactcaaagagtccgaagcaacgttgcttcgttcgccaaacagctgacgacggcgaacccgtgcttgtttttggatcttccatttttgcttctgatacttgagaaatccttcatagttatcagacatcgatggcataactgctggcaagctagcgaaggggtcaagagctgcatttgaagcattttctgggtgctttctcttctgggcgaccttggtgggcgttttggatttttgagtcgagctcgcgattgcttcatctagatcgccagcatactgaacgcgatggtcaagtatatttgcattcgtcgacgaaagtggcgtcttctcggacttgctaaatagatcagtcatcttcttttgcttgaacctgtcatccttcgtgttgatccgacgttgcaaccaatcagggtgggcaacccggggcactggatttcgaagcttctgaagtgcagccggaatggtaatcaacttctggatcacggatcctaaacgctctaagtaatagtcccaatcgataaccgttcgaggatccatatcgccggggtcttcttttagccattttcgcaagaagaatcgcttgatgttctcttcagctgaaaatatagcgacaggaatggctctttcagtgacaggtgtattccgtgggcgtgatgagatgatgtacttgcagttgagacctttgtcctttaccatctgttcacccaagaactctgccaggcgttttgccgtcgtgatggatgtggacttttgggaaccgtactcttccaaggtcttggacatgcttcggttttccgaaatgagatcgatcaactcttcatcggccaatgtcgttccatgttcgtataaaacatctaaccaccggtccgcaactcgagcaacagcggcgtaggtctcggcaagattagagccctctaggaagaatttgaagagctgggtctggaagatcttaatcaactttagctctcctcttcgtttaacttcgaatcccttgagttcagctaaagaaccatcgtgattgaagactgcatatcgtttcttcaggttcttgtcttcctccttcgatgttggtaaaatcattgcccggtacggtccatccacttcgaagaagattgaattttcactgtgagtctcatacttgaaagttttcgggtcgacaagtgcctggtactggtgattggtgtatcttgcatggacgaggtggttgagcatgacacaagggtatgagatacccaatttcttcccattcttcagagtgaaggagaagttatctgggaaccctcccggaagcatacaccaaataccatcagtatccaattccaggggacgaccgatgcgttcgacaagctctcttgccatctgaatgatgtgagcgcctgtcagacaagtgacaccagccatttccatggaataccaccgagagccctttcgcatcacatatccgtagaaactattgagaatgaccttgtgcgcaagctgaagagaatcgtacagaataatcatcttcttcgcttgctcgatctcagcggctgagccgcccgacgactgcaaactatcggctttgtttttccaggatttttgcttgcccttgaaatcatatcgtcggtcacggaaatctctgacagtatcgacatagaatggattttctctttggcaaatgatggcctctcgctccattgtcttgctatcgtgaatcttgtggtaaatcttcttgctgtaatcctgcagccgtttcttgaccactccagcctgctcttcgatgctcaattcaccgaatgacctcattggggagttcgggtaccggcctgggaaacgttcatttgctgtggcacgtcggatcatgttatattcatcacgtttggcaggtaagaattcacctcgccatgcccaaggcatgcgtctatcgcaggtttttccgggtcggttgaagtcgcaggcggcacaattcgactcatcaatcaacgagtctggttgcaatcggttggtgatcatgatgttaggatacatagaggcgacgtctaaatggtaaatgaaaggcacttcgtttcggactggatttttcttgagatcgagcaaacgctccacgatttgcgccctgacctcatcatagttcacaacatcgtccatgctttttttctcttcaacctcgatactgaatttgagggcgtggtcgagatcctcgagaagctcatcaatcgcagtaggatcaacggtaaaatgtgtagggatatcacttcggaagacaccagcttcaatactttcgacatggccgccgacgtaggtctccgactcaaggagatgaccttcataaaaagcttctgggggattcttgtgtttgttgggcaagacaatctcatgctggtaggcttgaaccatgagaagcatctcacacaaagttccagttcccttccgcaacgtttcgtcggcgctaaggggaatgatcgtgcagagcgagaagatgaatgggtggacatatttcatgtatagataataggttgcgacagcatcggaaaccgagtattcagctagggtctgtggcctttcactcgcatacggtgtcataagctctgggtcgagttcatccgggtcgtaaccaagctttgcgacagtcacggctttcaaaccacgacttccctgagggaggtaactgtcacggttgacccaggcgaaacagtccatatgcacacagttgtcggcttggtagatgtcctcgctgtttttccggaagccgatctccatatacatgtcaagtcccagaatactggctcttgtctccacaaatggccaatcgaagaagtcaccgttgtatgtcgcgataacggtaggcttggaaattttgatatgctcgaaaaatcgttcaagaactcctttttcattgggttcattgaagatgatgaaaggtccattgtactctggtttgggagtatattcaaagtcatgaatgtcctcagacacaatctctctgttggtaattaagaacccttgcccatcaatcatgtatgaaatcatcataatctgatccattgtggcgtcgggaaatttcagtggtaacttggtacactcgatatcaaaagcgagaacgacaggatcggcacgttgaagccgatcttccaggcaggtcagcgatatcacgccatgatctgcttccacattgtaccactttccaatccgaatatctgcgatgtgtcagcgacaaggcctcaccgagagtcacggaaaatactgacctttgtcaatgcagacccggacatggtatggcacgtcgtattctcgaatatcaacaataaaatcactcgcttgtaggttgccattaggtcgttgctcattaattatttcgtcgtcaaaaaggtcgatgccagcagtcgcactatctatcaattagttcaatgttaagatcgaaacacgtaacacagaacaaacctggtcatttcaacgtatgcgtccatcgcactctcatttttcttgttcttctctgcaagaggaagaatagtcctcctaacctctaaaaggttgctcacgttggcgaagctgagcttcatgtaggtctttcggtagccgagaaggtgatttgggaggttgagatcttctttctcaagtcgcttgaattttttgaccatgccgtcaaaggttcggcgacaccactcttctacctccatttcgtagcctttcttgactgcgatcaagaaataaggatcatattccacggtagctttgaaacttcctccgtcgtcctgcagaaaataataatccacaccggcacgacctccaggcacttctgaatcctcaatcgatgtgctgtgcatgttgaccaaccagccggctcttgtctcgccagactcgaatcgagggaagccgagagtctcatcgatgctgttggccaaccgaatggcctcgaatttctcatcttgggaggttgcctcggtcgagcgtaaggagttgaattggaccgtttttgagcgtcgaggattcgaggatgcagcactagatctgaacttgtttccatacttgctgggcttccgtggaggcattgcgacgcttcgcccggctggacttgttaaaaagtacctctagggagggaccagagtagaacatggaatgcgcacttggtaaatttcagatcaaacaagagaaggaataaagtataggtaggcacaaaaaaagatctggttctggggctaattgtgcctctaggagggtccagcaatggcttacgatctgctctaatcaaatcaatttcgatggtcccgacgcgttcgcgtaccgcccacgcgcgtccaaagtgttagtcagccttccggaataaccagccactttgggatagtctggattatctatactcccgatattgatgatcttcttcaatagcggacgaagacagctagtggacatctagaagcaagtcactctacacatctatggcggaagactcacgagactccagcactctttcgaaggctggtagcaacacacaaataccaaatgacctggccgattcgcaaaaaccgaaatacaatccgtctcagtcacaaactggaaagctatgggatgccttcggaaaccccgaggaaccggcgaatgcgctcgcccgagcaacatataagcctcggggcaaggaccctaaggatgttccatactccgagatcattggatcattcccggtctccgaaatgaccacccttcacaaaagaccgtgtgcacgagaatccttgttgactggcattggtgtcggattcggagttggtggtctacggggtgtgctcaaaggtatatctacattctttcggtattcggataccggaatcatggggctaatgtgtgcatgcaggacggtactatctatggtctgctggaaactgggctgtcggcatgtttgcgatcagttcattggcctcatatgaatactgccgctggcgacgaaataacgaattgagtggtatggcagaagcgctcgatctcatgaaccaactgaaggccaagaaacaacgtgagaaggatacggcagtggaggaagcggcattgcgcgcgcgtcttgctgaggaggaaaagaagagcaagagttggactaatccctccaactacaaattctggtaatgctggtgaggcatgaaaaggagtcgtggagttcatgaagtgtttcgaaaactgtatattccgatcaatagatcaagatcaagtagtgatcgacgtcatgtcataagtcatctctgtgtatcatagctctctgcaaagttcattccaattaatcatcgttggagtctcccacttgtccgaaagagaaaaaaatgtaaaccgcccatatgcctgcctttcaagaggaaaacgccgaagtaaagatatccaaaatgtgtctgcatattgcgcagctctgattaccccgctagaaattgaatttcactcgcttctggattgcaccttcgttcatgccgcgcaatttgtctagctcaacgccatccctcctcctttcgcgtcgtctttcacgagcctcccgggcttcacgattcttccattctgccacttgcttttgccgcttctgtgatctttcccacgcgattgaagcggtgggcttgaagcctataccgttgatcccatatccatcatccgttgggtctgatggattgtggccagttatttccgagtcatgccatacaagtgggtcttcttcagacggagtgtccgcgagaggaggggatagtcgttgcttgcgtttagatggtgacgagggattcaagttcttccgagagaaagtggctgcctttttctttgagggggaattgggcaaagaagtcggatcctgtgttgcgggcagctcgaatcgcagggcttggcggtcgctgggttcgctgctagtgaccggtagggcttcaggcatagtctggagctcgtggctgtcaggctcgcatgctttttgaggcggtagatccaaagatccctgctgtgagatgccagtcaaggtctcagagtccgaaagaaggtcgccacggatggccaactctccgaatcgtccagccactgtagtgcgaggactgtagctttccagctcgtcctcgtcctgaagtggaacctcttggaaactgtcaatagaggtggtcgatgtgggtgatgaagagggactatagcaatctgattcagatggctctcgtttgcgcttgggagaaaaagatgaaggtaagcctgtcggcatcatactgaaaacggacgtagtggggacgtcaccgagcaaccggatggatctcatttgtaaataaatagggtatccaccaccaagttgttctcaggaaatgaagctattcattctgcagagcccggaggtcagggctgagagggggtttggtcttgggcatgcggcattgaatcagactgtggggtacctccgtacaaggatcgccacccgcgcatacaacatacatcaagagattattatgtatctttagtctcgtttgtcctgttctgcaaggaatgaaaatagcttcccttgagagtagaagtcctactggctgaaaacatgatgaacaacttaaaacacttaattgaaaatatcagagcagcgatagtcagagctgctgaggcaaaaaggcctggtaataatttacaaatacctgcaagccgtaccaatcgagtcatgaagacaaaatcaaaacctaacgccatgacgaagactcccaagtcaaacacattgcgcatctaggccttttgcttcttcttggagggctcggcatccgtgtcgtgcttgcgcttcttcttcttgtcggactcgccctcaccacccacggactttctcttctctttcttttccttcttctccttcttttctttcttctctttcttctccttcttctccaccttagcctcagcgacttcggcatcctccatttccgcatcgctctggtcggcatcgacatcgaggtcagccagcacggcatccatggcgtttttctgcaaagtattagtctttaagtgttcatttcttagggtatatagaggtcaacataccatggcaacctcgttcttagtaggggcagcaccggaggagtagaattccaagcgctcctcaacctggctcttcagggcctcaccgaacttggtgttaggcgcctctgagaagttgtcaatgcgggaagcaattgaacacttgttggcgaggaaacgggagattctgcccttgttcttggggccagcgcgggcgatgaaggaagagtggtacagcagaccatacttgggggtgtttcccttggtcttcaaggcacggaaaagagccttctcggcaccaagaatctgaacggtagaggcggggtacttggagaggttggtcaagctaccggcgtgggagatcagacgggcgccgacgatttcaccgatcagggcggcaaggttaggagcgacgacgctcatcttggcaacaaggtaagcgtaaagagacttgcggtacttggcgagcttgacaacgcgctcggcgaaagcaacaacattctccatatcagcctcggagatctcttggcccatactagtcttagcagcatcaataatgctctgggcaacagcctcgtcatcctcaacaagggcggcaatgtcgtgcagacgttcgttggtcagggcttgcttatccttgatgaaaagggcgagctcggcgtagcgctggttgtcagagacaatcttgacgagctcggggaagtgccacgagtaccattcgcgaactctcatggagaaggtgttgatggccttatcgagctgatccagaatggcgatagcctggatgatgtggttgtcgtcacgctggacggagaactttaccttagcgcgggagtaagcgtgaccgagaccgagctgggcagtgtccatgtcaccatcgcgcagctgcttgaggagtttaccagcgtggagacgaataccacgaagcatatcctgaacgacctcgctggtatcgccagtctcacattccacgaatgagaaagcggacttgatgcttcctgccaaagccttgtcggcaagacccaggatcaccttcttcttcttgttcggcttggggaggttcaattcaaggaaagaaactagagtatcggatgcgacaccttcggagatgtcattgatttctccaagagcctgcttgttgttcctagaaattgttagtgggcgataaaaaaatgaaaaccttttcgtttagatagatagagcgtactcgaagggcaagaagctggaaagttcgaccatcttgccgaacctagcaaggtcattgacaccctcctgaacttccttcaaggcattgccaacagaatcaccctggtgggtaaccttgaaaagcgagtaacccatagggccctcgaaaagtaggaaatcggccatcgtgttagcgccaatacaaggtcaatcacaaaataatgataagaacttgtaacaccggccagaaaacctcgcaaagtgcaattcgatggggttgctggtgaggttggcgacggctggaatggacaatttttttttctcgccgctagtgcgaatcctaaggcagcgaaccggaggtatgacggtcggcctcggagcggacgtttacccgtcccgctgatataaccacgtgatcatatcgatgctcgaatgtgggctttttggccgcggacctaacgtggaacaagctctctatcatcccttaatttaatatttttgagttactggacgtgataccctgccattcattacctgggagatgtctgcaactcaactacttaaccccaaggcggagtcgagggtatggaaaatattcccagatggcccctcaatgatatgcccgcacactaacatttcacgcagcggagaggagaggccttgaaggtaaacatcggtgccggtgaaggtcttcaggatgtcctcaagtccaacctgggtccttcgggaactctcaagatgtgagttttctccgaatacacctgacatacaaaggcaacggaactgacaaaactcaggctggttgatggtgcaggcgcagtacgaaacccccgattcctctcgaacgacaccaaacatcccttttctgatacaagcttgctattatagatcaaattaaccaaggatggaaacgttctgttgcgggaaatggttcgtttgcccccagaatcccagcatttcgagcttgcgagctaacattaaacagcaaattcaaaaccccacagctgtaagatgaaattgttttcagagtctgatacgtgttgctgacaaaactgaaaggttatgatcgctcgcgctgcgaccgcacaagatgatatcaccggtgatggaacaacatctgtcgtcctgctagtaggagagcttttgaagcaagccgagcgtcatatctccgagggtctgcacccccgtgtcatcactgatggctacgagattgccaagaccgaggccttgaaagtatgtgttgcagattgaaagtcgaatgtccagatgggtctaacacattacctacagttcctagaaaacttcaagctcgagcgccccattgaccgggagctgttgctttctgtcgcccgtacctccctctcaaccaagcttaacagtgctctcgctgagaagcttacccccgacatcgtcgatgccgtgctcgccatttacaaagcccctgagaagcctgatttgcacatggttgagatcatgacgatgcaacaccggtcgtcatcggatacccagcttattcgcggtcttgccttggaccacggtgccagacaccccgacatgcccaagcgggtggagaacgctttcattctgacattgaacgtcagtctggaatacgagaagtcggaaattaactccggattctactactccaacgccgagcagagagataaactggtggagagtgagcgcaagtttgtggatgcgaagctgcagaagattgtggacctcaagaaggaggtttgtggaaacgaccccaacaagggattcgtcgttatcaaccagaagggtatcgatcccctcagcttggatgttcttgtcaagaacggcattttcgctcttcgacgagcaaagcgcagaaacatggagcgtctgcagctagtctgtggtggaacagctcagaacagtgttgaggatctgtctccggatattcttgggtgggctggtctggtctacgagcatcagcttggtgaggagaagttcacatttgttgaagaggtcaaggatcctaagtcggtgactatcctcattaagggtcctaatggacacaccatcaaccaggttaaggatgccgttcgtgatggtttgcgctctgtctacaacaccattgtcgatggctgcgtcattcccggagctggtgcattccaagttgcatgtgccgtgcacctgcagtctcaagccttcaccaagaccgtcaagggtaaggccaagtggggtgttggtgcattcgctgatgcccttctgatcatccctaaaacccttgctgcgaactcaggccacgatatccaggattcgctggctgctcttcacgacgaggcaactgatggtaacgttgtcggcttgaatctggtcactggagagcccatggatcccgtccaagagggtgtttttgattccttccgtgttctgcgcaactgcatcgcttccagcacaggcatcgcatctaacctcctcttgtgcgatgagctcctgaaggctcggcagatgagcaaatccggtgccggtggccccggtggtcaggaagagtaatgcactttctcatttacgaagtcaggaggttcatgtaaagtttaaaagggttaaagacttgattccctcacggagtcaggggccaagagccaatctattcaaaaatgcacaaacttcacgttgcttctcattgtcgtcgttagatggaaatacgtaatcagcgctatcgtacataaacttggaagctgtctcgttgggagaatcagtcttcttccgagctaacgctttggccatccccatcagacacattctcgcggggccaatgtccctcaaagccttcttctctgactgggtcgtccagggagagatgatgtgcttgagcccactcccagacatcggattttcgaatggtgaccatctgacctggtggtgtagtattgtcctccgcagctgtacgagtggatttacgttttttcggggtggcctgaggttcaaataaccccatactcttgagtgcagtgatcacatcctcggtcaacataccagttcccaggccgagttcttcgactgtaatggtctcgcgcaaaggtctcttgcgggagcctttaggggttgagctgggcttctgttggtcggtttcaagggagctgccgctaggtttaccgcggagtaagaatcgggcaatccgttcggcccagaaacggacataacttttgtggcccagctcacttagtggcttctctggtccaccgatgcacccaccatttgagtcccatccgctgagcttgtagctgacccccatcaacaacttcccaagctgcttatgttggtaaggcgggaagatcaaaatacaggcaagattgttcgcgtcccatgagagtttctcttttgaaaagaaaccgagcacaaagtagctgtcggggtcatccgggtcggtgaaggtgaggatgtagtacaggaaggttgcgacgtcgaaaaagactgtcttgtggtcgaggaagagtttcgcaaaaagggacagattctgtccgaaaagtttgtggttttgtccatcaacctcccacactgcaaacccgccatggtcgtagactttcatgcctggtggcgttattcgatgctcgcaggcgcttttgtgttcttcaaagatatcttcatcgcatgagtatcgaaagcaccagcgacagacgtagagtcgatcggcgtccttggcgacgaggtcttcggggtagacggattgattccatggcttgaacaagagatcgcccagtacgacattgttcacgttgcgaccggctggggtctgcaatggcgcagacttcggggtcgccattggattcttatggatatttgagcggcacaacgtgatatctaagttgtcggaatgctaggtttcgggagcgttcaagcgatgtaccgactccaatggaccagccattggtattatcgtggaaatgagacctgtaggtggaaaaaaagagtgggcacgatcgcgcaggcattaggcgaccgttatggaaacatcctctcaataataataaatgtcattcattgcccattgaatccattcaaatgtcccgtagtcggcgcctcagattccaggcgaatatctaatgtcatgtgatcggagcggggatcctccggagagcttcatcatgctctcatgctctctttatcctgttgcctgaacctccctgcttttttagaatttgttgaatttcttggatttccccattccttttgaaaaatccgaacttgaaacctggaagtgttgccacaggcggcagcatatgaatctcgtgatcttttttcccgtttatacactcgccgtctccaaggcctaagaggcatcataattccaacccatttcatatctttatatcaactctttcaactctagtttatcgtttttgtttttgatcctgtaacaccgccacccacctattcgtgttcctgatccgcaaggctcacagtacatcttctctacgatgttgaaacccttccaaatcagaaaccttcgggtatcccaacccgggcagtctgcggattctcgtactcctgcaggagttgtccaaatctctgctacagattacgatgatttggcgtcaaaccatccccgcgcaaggttgacttacatggatgacgatgatgatgacgaaacaatcaccgtaagttcagcacagtgtttatcgatcatcgaaatctcactcttttccttaggttggatccgctttcgagctctctcaacgccttgaggagcccctagacactaacacacagcttgaatccgtcgaactctctccccaagatatccccatgcacatctttgatattcgtcgatcatcaaactccgtgaccgagttgtggaagcgatttgaagataacgttccaaaacaaggcatggctgatgaaaaggacgagacgcaagctacttctaagactattgttctcgaggagcaacatgaagtcccagctcctcatatcacgatctcgccgtcggtctctagggaccagcctcgatctctcatggaagcattcgaagctgagctagcagacattctcaatgacgctgagtactcggagagtcgagtacctgaacctgactcgccaccgactgggtcatcaaccaacacagactcagggcgatcccctcatcccgttgagattttggcagcacaggttctagaccacctgatcaacggagccactatggtacaatctgaatggagatcaaaaatacccgagctacagcgacaagtacacaatgctcagaaacaatttgaggctgcacagagaactctgcctcagaatgtgcaagcctcattgcggacactactcgccactgttgaggctcacctaagaaccgcttataataatcttccagatggcggaaggcaaatggcagaagatgccttccaggcaggaaggcctgttgctgagaatgctgctgatggttttcgtatgatggcctccgaactcaacgaagtcggaagaacattatttgccgcatttgaaagcgagtttgggcgcgctacaccaacagcctctgcgtcgaccccggcttctgagatgccaaattctagagcaaccgggccgttctttaactctagttcaagcaatgaatctgcggctccgagcactttgtaccagaactcaggcgcacattcttcaagcacagccagaaacgaaaagtcaacggtagactcaggtcatccgcactcatctaatactgcacaagcaggagtaccccctatccaaagttgtcatggtcaacccgcatcccctcactcaaatcattgggcacctcccgcatggcctgctccgtcctggaatccattccaaacttataacgcacccccgcctccgtgtcctccaccaccggcatcgctgccgaacttcacttactggcctcaaaggccacctgcgcctccacctcttcctacgttcaattccccgttgaaagctacacagacatcgaacgtcatgtctggagaattgaaaaccgattcagcaactaagtccttgtttattgggaatgttggtttcaaggttaccgataagatgatacaggatgtgtttgctgccaagggattccttgtcgaggtggatctcccattagataccgcatcaaaaacacatgcaggcttcggctacgttcatttcccctcggattatccggcttttgctgcaatggaagcattgcaaggtgctgtcattgatggtcactcgataaaccttgagcctatgtatcgttcccccatcgaaggtgtgcgtccggtgcagatttcacccaatgccagtacaaccacacacgacactcagacagacagcgccccggatgagacgagcgatataaccgatgctccctctgagcgaaacagtaccacatcggggccctttgcctccccgcttgctatcaagctacaaaatagtccatccaagcctggcaaaacggataatcagacggaaccgtccgcactacttgattccccaagtgacgatcctgcatttagcgcacgtttcccctcgcttttacccgagacgagtgcacagcataacgatccattgagtggtcgaggtgtttcctcatattcgcacacggagtctggtttcccacctgtgtctcaatgggaagcccaacttctttcaaatcggcaggaacaccgcggagcagaacctataactggtgttttgcatagtcaatcaccaaacgacctagaacaccctgaggtactctcaactcacggttcacccttgcatcctaccccgaaggcatttgctggatctcaaccagcttctcgtctagaggcagccggcaatccgtcatcaatcgttggtgctagacgaccttccgaccatagtaaatcaatgcaagatcaaatcggtcattcttccggtgccaaggagactgtgcgcccagtgctagatgtcaatgacccccagtatgcggtcaaactgaagcgtcgagttactgagcaccaaacttataaaccaaatcattggaacgctgcggagactggccgtcgtaatcccctcggtcattccgcgagcgtgcgtcgtcctgcagacacatgggctcggctgtctaggcgagaacgaaatggtgtatcttctcacgagcgaatccccggaagcttcccagtggacgatacaacgagggtcgaactctccagcactcatgataccaatgttcctgagtcggatgacgggacaatcgaacaatgtgtctctgctcttgtcgacatgggctacggggctggacaggagggcggacggtcgaggatggctgtgtatgcagccatggcaaatggtgtcctcacggatgcgattgatatgattgaagaggaaagacagatctatgaacggcggccttcgcagtgaggcatggaatattggcttgctttttttgtttcagggttatataatgacccagtcattcctttagctacagtttagcttgactggacctattgtggcgtcattcattctcagtagggttgaaatcccactttttgctttaatgacttgctaggccaattatccatgggacttttcgagacctcaacctactatgttgcatgtcccataatgaattagtgtatctaccttttaggtgagcttgacttttttttttttaatatccttcttacgtttgggaaagacaaagtgtctgagttggtagaccgtaggagtggcccgttatatataaaccggtgtacaactcaagaacataacagtgaaatgatagctaacgatgtatttatttggagattaattcatttccggaagaacaaattgctaccaacgcaacagcgctctaaaaggatacaatcagtggtctttatagtaatgtacatagtaaatacagagaatgctaatcggaccgacatcaatgccgataagtttcctggcaatctccgaactcccgatcatccaactcacagcagccaggaccttcagcaatgcagatatggcggcgaaccttcgccacatctgtgggcagacttaatcaaagctcaattaattcccgtccctctcttgttcgatgcgcacagatcctccaagccagcaagaacggtggagtttgcagcttcgaggaccaagaaatcaaagtgaatgggttcattcgatctgtacggaaacagaaacgctttgcattcgcagaaatatctgatgggtcgaccgtggtgccattacaggcaattctaaaacccgcgcaagcagcagagtatgttcgcgtgagctgtggtcctcgacttgtttgtccatgaagactaacccgagctttctttagtctgtcaactggaactgcgatcgaaatatcaggcatatggaaagcttgcccaccgggtaaagagcaaactcatgagctccaaacaagcgatgtcaaaattataggcgcagcggacccagaggtgagaccaagagcatttctacagttgttgctcctcacactaaccacgatacatatggttacagacgtttccaatccaaaagaagtaccacagccccgacttcctgcgccagattccacacctccgcattcgaacgcccttcaattctctcctttcacgcttccgatctgagtgcatattccaacttggcaatgtcttccactctcatccagatggagctttcacacaagttcagcctcctcttataacgtcctcagattgtgaaggtgcaggtgagacgttcacattagcaccacgcggtgccgctacacccaccaccgagaacgagcactttttccgagcgccaaaatacctcactgtatcgtcgcagcttcaccttgaagcttatgcggcagagctaggaaacgtctggacattgacacccgtgttccgggcggagaagagcgatacgccacgccatctcagcgagttctacatgctcgaagccgaggtcaatttcatgtccgatcttgactcgctgacagggttagtggaacacctgctacgcgatctaacgcgtcgtctatataatactcatgtgggccaagagatcctgtcggcaaagcggtctggcgagccaggccaggaaaccgcagaggagacgacaggatctctacggcaaagatggaccgatctaatggatgggccaaaatggcaccgggtcacatacacccaagcagtggaaatgctccagcgtgctgtcgccgaagacggagcatcatttgagcattccccgacatgggatggaggtctacaacttgagcatgaaaagtatatcgtcgaggtgctccatcaagggcgtcctgtctttgtgacagactacccgaaatccgtcaagccgttctacatggccccttcgcaagtcgccgatggcagcaacacaaccggagagacagtggcatgtttcgacctgctcctccccgaggtcagcgaagtcgccggaggctctctgcgcgagcatcgcctgcctgatctcattcagaacatgcgtgagcacggtttgatcaagccccgacagattcccgagtcaggtgatacagctccagatgagtcgctgtatccccatctcactcccgacgaggacctgagccacctccaatggtacgctgacctccgacgctgggggtctgctccccatggaggctttgggctcgggtttgatcgattcctcggatatttgactggtgtttccagcgttcgggatattgtatccttcccgcgatacttcggtcgcgctgattgctgagacttatcagaggtatcacccagtgtatgatagatatgtaaaataatgtacatgaaaactaaatagttgaatagagggaaagttggaaacatggaaccgcaagcgacatgagctgatctactgtgcaacttttgactgggcctggatttgctccattgacaatgaatctagtatcaaccggggcccaacgacgctaggaataaagtcgccgattgattcccgaataggaactaagacaggcacttatccgcagacatccgcataatggagcctccgtcgcgctatgtgcccaaatccgactagtgagaatacaagtctcttaccatctgaagctaaaaaaagggcttgtgctaaccggtagtgtccggctcagcttactttgtacattagtctcctttaaccattacgcaattagggcaaaggtcacggtggcaagacatttaccacatgggcgttttattgtcctagagtactccgtaatggaaccaaggaaagacagaagacgaaaacgactgaattccgaccttcatactccgtagatgtcggactatctccgtaagagctaggagcagagcttatttatttacatatgtccccacctttccatgccgatttagcctatcttgtttgctagtcagattttaactttaaatcgtgacttcgcagagctccaggcaaatggatagtcggccgaaaaagaagctggttactgggttatagtgaatattatgacattattggatctagcccctgcccgatcatcctagacagccagtcgaagaagccaaaacaattaaaaatccggaatgctacggatttgcgagagaatattacttccgacaccagtggcctcataccaaacacgggagacatttgtaatgtgatatcaaaaccggatgataccagtctgagcacagagttggatctacgtatgcttactccatattttgacgtgtccagggctaagcatcgaaggaatcaggagtcagacactagaggaactagagtgcgacatatactccgtacaatatacaaacactgcacggacgaaagaaaaatggctgagtttaatttagcgaaggcaaaaataaggcatagatcgtgcattaccaaagcgccaagtgtagacgatcgtttcacgataagagtagctctgcgcaatactccgtagaccgtggcatattgccgtacggagcatagtactccatactcgtatacggaggccatgtacggcagatcttatccctgattttatgcaccggaggtccggaccccaagcaaagccaagcactgtagtctggaaacgaggcgccccacagaccaaatgtaaaaacaatggggcgtggcactagttggggtagtacgtaggttgctgatgattggcaacgtagatgcatatcagtaccgcgattcggaaataggacagcaaggcggatatggcaacggaattaaggacaatcgagtctcggcgtaccccattaggaaaaaaacgtggtcctccgagtggatttggagtattttgactcacgagtcactttatttcggacctcgcttatttatgcctagcatttttggatttataggtttggattgccacttgtccttattattattctgagagccaatgattgtatggctaataataaaaagaccatgatcagattaacgagttacagctatgaatagacgtgtacagccttacaacacagccttgaattaatctatttgactttgataaaatgagccctgattccatgccaattagggggttaggatcagcaggccaaggggtcccaaccttaccagggttaagcataagcagaaagaagttcgggcagtgcgcttgagtagggcatccctgtctgacgtatcacattgcagatagcctacaggagatgtgatttgtggtaataataagtaactagtcaaataatatcccattattttagtatgcacgggtagggtaattgataatccaggatgattacaacctaggtcaaggttacactccaagctaagacaatattacatagttcaaacagatcaaccttcgtattcggttctagcagctccccgaggaaaataatattccgccacatggtcatgtaagacaagcaagttggaaccttggaaatgcctaggtaaagtcaagtaaagttaagtgaaataaaggtacggaagaaacgttaaccataaacctgcagccacaggttccatggttcgcaatgagaaaactggcttttaggcttcgatgacattgtcagccagcctagccactcaaggttggcacccgcttggcattcacaagctcttggccccaagagttaccaaggtgctacttgcccttaatatgtaggcaccagcatttgtcggtgcattgccttttcttagaccgccgtggagtatgatgtgttgaatgttatttataaagttaatattacaaacagaccagaataaaatgaaccccatgcaatgaaacataaccataaccataaattgaattaaattaaaaggaaagaaggaagaaaagccatttcagcatattctctattcatctagacaatggatactttaattatgctagtggagataagctcgtgtgacgtttcacaaaattagttcttggcaacctttaattccagggttgcaacgaatgcatgacaatacaagaaacagttactcgcacgtcatttctagtcgattatagatttgtgtcagttgtatatttgatatctggtctccgactggagagatcaaacactgcagataccttgacttggggtttataacgttagaccggatcactaatcggagattattcatgagcaaaggctgtgtagcggagttacctcttgatatattcaatccgaaggagcccgaggccattaataatagattagcagctaacgaatacagttccagaaggcccacatgaaccacggtcggcgaaacagtcggtttatcccgcaagggtattctatcagctggtgagatatagttagcgagatgtggagctggacccactcaaaaaaaggagtctccgggtaaccggatagacctcaagagcatacgcaatcgatattgtttttctttacggagtacggagtagtgaagtgcatggcagctctcttggattacggagcagaaacccctgaacccagacattggtgtcactatgccctaggtgtggataagggggggcgatgtagacctaataagctggagatgggtttccacctggcaaatgagagacactagactatcccaatgtagcaagacttcgggatcacggctgttaagggtggatccaggcgatcttgggaattcgaaaattcggtcggggcctgagcttctacactaacattgaagtaattgtatggttgcatgctccaggtaagggaatgcctttagtgatctgagttggtatgcttcttttagcgttgaaggaaatagagccgatgttaaggtgaaaatgtaacgattccggctttttctgataatgatcagctgcatcagtctgattgaaacttggaccctgccagttaacctcgatcatttcccagagcctatcattaaccgttaaataattttgactgtggcacaagagcacagcataatcgtacggagtattagtccgctaatccttatatcttgcatattcaatcatacgcaccaaactatatcttccatagcttggtcactcaagccttgtttcttattccattgaacctagagcaaaaaagcggtgcgaccttgcacactccgtatacctggtagacggaagaccgggtcacgaaggtgatgttttagtcacacaggacggcgccatgtgagacatgtaatgcaggcgatataacgtatgtaggaagtacgctgacactatgatcggctcgtgccatgctttctgggaatagagacacatggaccccccagcgttttaaacttcaaatgggctgaagccaaggagaaaatcagctgccaagctggactagcttccccgaaccctattagagtgatccttgtgcaacgggggagtttgttggcgatacgctttcgctggcttgcattattcggcccgtgcgtgacagaatcccgaatagagttatagcgcaagttcaaatatgagaaagatgtttctgacaccttttacgtatgcaatgtaccaatattggatttagaatgtgaggccctacccacctgcgaggctaattaggtacaaggctaaatctgcacggcgaacatgaacggcacggagcgcagactcggaccagttaaccttatcgttgagtcaaggtgtcagcagacatgattcagtggaatcatattttggccgaccgcctggtagttggcggatcatgttagtttaagccattatttattgttcttggtcctacacgaacgttataagtcagatgtgaagcagtgcactttctaatgtagcctgtggctactccgtagtatagccagtcgtaactcatcatgttacgtggcttgctgcctagctcgccgtgcatcattttatgcacgcaaacaatatacgtacaaaataggaccgaccttgagaccgaaacccggagatttcttgatctacaacactccgtatgtatatggagtacggagtacactgcatcggtttagtttatgttttcttttccccgtatcattgctttgatctggactaggattttgtcaagctttgtggtcagcgcagttaaaatccaaacactgcgtcattggacctaatacgagtacgagttacgaggatatgaccactgtggcttaggtttaccatttttagcctatgagatattgaatatctgatataaattaaatgtcccgggtcagattcgctaagatcaaccttgtttggatgtgactcgtatgggatttgcctgccaagggatagggtgctggataaggccacatcggacgtaaccgctcaaactatgtttcgacggggtacataattattaatcaatggctatcctcggtcctattgctaaattccgatcgtcaagtgggcttctattccctggtaggtggaaaattactatgaggactcttctttaagaatggcaattgaattggtgtttcaataacccggttgaatatctaaggtaatatataccgttgactacatactacattgactacgactaccctacaatataagtatgttgtagtccataatcaccaagtcccacaatatagaattgataaagttccccttttgccaataatgaaaatacccaaagtggaggtgtggatgccttataagcgagcataaagttcagcgccggtctcctcgtgttggattaagcttaagagttccgcactaacctttttttgtgaccagagcgccacttttctgacacagaccatttccaatgttttcttttcttgtttcttaccatacggaggattctctgtttattaatgttgatcctattatatttaatctatcaggaatggagccgtgaaggggccaaattaaccttactcgcaagggtttccaaaccccgtaaagccgagccaagagttgcatggcattaactagccaacccggaaaactggttcactccccgtcactgattatattgaatttggttgtagactcacagttatgatccatgacgtgcttagatagctctaacatataattactccgtacaggctacacaatctgaaagcctttgtatagccgtgccacttcagccccatgtcgagaactctcctttccaaggtttcccatgcataaatcgtgtggatttcccagatccattatttccatgtgtaccgaatccaataagaaactaaaataaattaaataattctcttggaatctcggcgtttaacaagttccgttcgatcttttcgcttggatcgcttgacccgctcttcttctctccgcttcccttatttaaccttcttttttatgatttcttcattgtttcttataaagcgttgcgggaacatctcctctttttagttttcctcttttccctcttcttctagctttctctttttctctctttctcgttggtattcactttccgagacaagaacagctaagccattccttcagaaccccggtggagtcatcatagtaggtcgccccccatctctctttgtgccttttagccttggctctctcccttgtccggcattcttatgccttcaagcccacctggcccacaatctctggtctcttcttccattttgggataaagccttgaatcttgaatcggtccaaaaaaaaagaaaaagaatgaaagaatagcctagccgtcttgagctcaaagctcggccttacccacgctggcttccaggcttaccccatactgactcggatcctggttccttttatatttggacctgaaccctattttcgtcctctccacttgcgcctctttccttttcccttagatctaactcattcctctcagacacttttcgtactccatttacccttaaaaatccctttatccttcaacctggcaatcagatcaaatcaaccggggtcgtcggttgactcgagagcttggatggagacgtattacgggcacgttcgcacgcctgcggacgctattattcttttcgaggcttgccgcatcggccttttacctcgcgtgcaacgacgattatcagagaaagagcgacagtccatccgttccggttcggtcttcgtatgggatgagcgagaagcggggatgcggcgatggaccgatgggaagtcatggagcgccagtcgtgtatctggtagcttcttgacttatcgtgaaatggaaggcaaacgcggaggtggcagtgtctctcaaggctctgcctcccgcggaggcaagacgccggagagtcgaggcagtgacgatgagcgcgccgatggaacagatgagggaccggatgggtaccgttacaaaccagatggtttgatgaagcagtctttcagtatcacgacatccaacggtcaacacttgcatctgatcagctattattcacgctcccatccttctgccgccaacttacaacaaccgacttccgatcctgccctgcgtcatgtccgaccccagaaaggtctctatcccgagtcgacagttaatgatcaacaaaatctccctgtcgttacccgtggacctatgccaggcgctgctcacccaataactccgcatcccctcggcgcatacccacgcgtcactcatacacagccatacccccctgcctatgcttggccgcccacccctctggccaccccaccgactgtctcggttcaatatgggcctggtccttcttatctccccccggttggtgccaacggacaccctcattatggcccaccacaccatcagcctccgcatcaacatggtggactcccactccctccacacgggatgaccagcccctatgatcgaccacatatggaatcaacattacctccagctggaccgccaccacaacaaccaagctacatgaaccggtcgccgcgatcaatacatgagcatgctcacgcccacgctcaagctcaggcccatgctcatgctcaagctcaagctcacgccaacgcacacgctcacgcccatgcccacgagcaacgcaacgcaccggtctacggacatctagttgatcctcgtatggcatcaccacgcgtgccagtccagtccctgacgcagtcaaatggacacgtccacagccctcacctagtgaagcaggagcatcctgccgcgttgtcctctctcaaccccattgccacatcaccgaaatcttccgatcctgcgagtactggaaatgcagttcctggcatcagctcattgatgaatggtgcagcgttggctcctttccccccatcgactgcctctcccggtggccccgccacgagcttgaatggaaaccccgcacagagctctttcgccgacgggccacgggatatccctaatgagaagatcggattcggaggcgaggatacgagagcgctgcgtcagctggaccgcgccttcatcgcatgaatcgctcgatgaaggttgtttgatggattcactcaatgaaacaaaaaaatctatcttaaccccaacccgctcacagggttgatgcccaacttaacctcacactttatcttcatgtctatgtttctttatttgctgcggctccagggagtcttgctgctgttccagtgatatccttttgttttatctttgtatttgtcattattagcatcttgcatgggtcggggcaattcgaattcttgcttttatgtgatcgggtcatggatacgggttcaatggagccttttcatattatgcattgggatcggtctacacggttgggatacggcttttatttctaaatggactatctgtgtcttgtcaatcgacttgctttttccatctataactttgcgttgtgctctccgtatacttagacgtatctgtgtagacacctgagaactggcttggaatccgtcgtactctcattgctttcgcgtcacatacttcatgtatctatgtacggagctctgcatgctgactttcctatggtaagcctgaacaatcatcaactttgacaagctcgagctatgtcgctttagcttcttttgacgtccaaataaccgacgactcctcggactcccatgttacctaggactccacctcaggcgtctgggcaatgggaatgagaaagtgatatccaagaccagtaatagtgtcgtaatcactgatctatatgggacgtcgtaccttgtgatcatagtgtccctcctaaagtgaatacgcaacgttcgttcgacattcctgaccattttacaatcttacaaatggctgcctccttcgcggatcatgctcatctcgaatcatcgaatcaacctatgagaattgaaatccattccttacgctgctagttattaatgcacgtatcagattacgtggtagaagataagtgatcaaccaaacgtgatgatctagctactgccatgaagctctctaaagagcttcatacgaacaaaaccacaaagatctcatcctccagaatctagaagaaacatctctgcacgtggataaagagactgccaacacggcaagctacctgcgagaggagagaaagaaatgccaaagagaagtctacaaactgcatagggaaacagtgaaagcgcccaaatgcatcagctattcgccggcttcaaccaatctcttggtctgggacgatctccatgggaacaaggtaattgtcaaacctcctcagagatctcattggccattagctcaactctatttgagacctagctattcttatcattccccaatgcctacaccgggagagaaattaaatctcattcggtgtgagctataacattggcctcaaaaacaggaacaagaacaccaaggaatgaaatcatttacgaggctttgcccctgagttctccccgggccgggtaggtgcatgatggtcatgcagaggcagctttgccgaatgcccatctctcgcctaggaataccttgtacattaggaagttctgatctgtcgattcgatgataccaatcacctgaaggagtctgcagaacttcaaaacttaattctgcggtcttttatttgcttggattttggcctggctggacctcgtattctgagactgcttcgggaagatatgtgagggttggatcaggctcatcaaaataggcaaggtatattctgatacagacacgtcgatagagccctggttaatatccatagatcacggcagacaaactcggggaagggctccctacattgagtatagccttgcccagttagattgtgttgccttaaatgacgtatccgcgctacgatctccgttgataaactagtgaagtatctgcaggatcccgtggctgcaatcctcggcgtcaccattcaactagaataccttagaagatctactcggcccataacttctgtactccttttacttgattatctggtggtattactcgtagtatagatcggcacccgtgatatgcctggttccagaagtccctagatattcgcttcgtggagggatgtaatttctcacatctaggttcaacggcggtttcaaaatggaagctggttatcttggttgagaagccctgtctgggtttataggaccctcgaattcccactacatgcggtatacggcatcgggaatgacagttggtacgcctgggttcattttgtgatagagaccaagtcaaacgggatgattctggatttgatgcttgttttgggccaccaacgatggatacatcgatccagtcgcttccgatacgagctttactcgaagtcaatgctgtcacaacaattgtgaacgaagttcatgaacctaccattcgggacaaatcacaacacactggcgttgtgcttattttctaggatattaattgaaataggaacgtgttacatccttcaaattatacgaggaaatctcgctcatgaaccagagtaatgcgattgtcaccaaggagaaacaggtaacctagctcgcaagagaattaaccaatataattcctagtctatctggtcgacttcaactacatagtcataaagcaagagcctaagaaggaccgtgaccttatactattccttgtgatacatataacattggtttatgtcaatgcgaaaaaaagaggttcaaaacatattgccatctgttaggatgtcgatatataatgctgtcgttatcattggatagcatctaagctcggtctttagtctcacagctagtacgaaaagctccagaactgtgaaatattctggcccctgtataacttcgaagagtaatctgagtattcgctgcgaaacggtgaaacagtctgtatgaattcaagtacacccaagaatggcacatatactcattatttccagatctccaaaatcgtgaaccttccgagatggcatttttatatttcaccgtagtactccgtagtgtagacactatgtcatgtttcacaaattatctgttagtctgagcttcgtgactcccgctaccaagtggatgcttcctgactttgagagatccgtcgaatacggccgagacggtggattatggcacggtcaacatagcgagagaacatgttccgactgcgactaaaattcatgtattattgccgatgggataatagtcttgatgcctctaagcctactctcctatctagtatagtttcgaataccttgagactatacaagatcaccaagagatgtcaacgaatacatatcggatgacataaaaaaaaaaccagtcccgctttttgggctgctaagctgggccgatatacaacctggggttctgggctcatgtcctggatccgaaaacgttgagacgtggagcattcaactctcacgattgaagtaagcacattcctctgggtcataattggctcttaggaagctcgagggatctgggagaaaagaaagaggaacctcatgaataatttcgagattgcctatccacaatccaccagctggatgccgatcacactatagccagcccctgtcgtatgagaaacaaaaaccagcatcgcatgatacatttgaaccctcttactaagtccaggtaactagttagtcaactagttagttagttagttggttaaatacctcattaatgtttgttcagtggctatattcagaggggtgaagtttagcctgctttgtcaggccgcataagagtagtccgagcgtttgctcgatactagccacaaaatgctatgggtctcttatttcgcatgtcgtgcgtcatattatctcaaaagagacatgtttcagatatccatagttttccaataaatcccgaatggcccagagacctcatgatcaacgccgacgaaattccgattattcctatgggcagttggagctgaaagaggccgaaccgaaccgaagctaagcgagtggagcttgaagcgaagtcaattcttttcctataggttatacaagtatgtgcaaggctacaaaaagcttactctgaatggtttcattggagagattggaagaattgaatggagcctgtgtactccgtacggagtacaaccagtagtaggaaggtggaagccgaaaatttttactgatctgactagtgtgctgcgcaaggctcagaaatctgttcaagtgtcgctgattggtatatacagcatcgtcggcccaattgtcgtgcagcggttccggtggtgcctggcggggcttcccttatgcggcgaacaccggttagacatcatctcctcgtgtccactgttggcggcgtgcaagtcttctctcgggggttctccgagcgtgactgggggtaaccggattaggcaatagcctcactccacatctgtacgggggaggtcaaagagcaagaggaagagtcagagtgagaggccgagcgaggggaaaaagtacgaggacaagctagtccagaccttaacttcggcttagttactggattggtctatgccctggaggggggtaatatggctccgacctatgaaccgagcctggaaatagttatgtcctttcgtttgtactccgtttacccccttaggtagctatatggctcatttactcacaccccttgctccttaccaggaacccgaacaacatcagttgaagcagccatgacttctttgtttccggccccactgggcgggaacaaccgttgacccgccttgaaccttggaaacggatatttctttcattgttgaagatagtatatagatgtagatgggagaaggagaaacacaatagtgctctgtagtacggagccagagtggggatgatgcaacatcgaaaaagcaaagtgacttcagggcgttccccatattttcacgctagatcacccgtatacattgcctgactcgttagtgccacataccgtcagcgagccattggctcaggtcgttggtcggccccgtcagatcaatggacttgcatggtcgatctttgagcaaaaaattgaaacgaactaaaaaattgatttgagctactcacataactagcccggccctagtgcatagacggactccatatgaaactccacgttcgaagcgaagacgctgtacggggtatcgggcaaccacacagtagggggtatgaaaatcatcctctctgccgtctcagctgatgcgtcaaaatggttaaatgctaaaaaaaagaaggacgacattggtccgttactaactccaaccgagtgtgtttccttgttagtctcccggcagatccacgggggccttgcgcagtctgtacttttggtgacctcgccacattccacccctttgggctgtgccaggttagtgagcaggatatgatggaaagggtaatcgacgcgaatagtaaaaggaagagaatagggtctgctaatagatcccctacagaacattagctctattctacagacggaatgacggccacggattccgatccttgtcaattccctgcagcggatgtccgtgctggtcgcacccagaagatctggcccactctttaccccagatttgttggcgtagcacagagggagtgagaaacgaaaatagaaggaaatttcaatgtggacggggatgagggatgctgcgacccgagtgatggaaactgtcgccgagaatagaagatctccatcggttttccggtcagcgcgcttctccttcctaaagagaaagggaaggaagggaaggtaaaagaagattcgacagtgtggcttgtacatcagatggttcgtcggaagtaatattaactcatttcttagagtacacatcattctacctgaatgttctacggattcttgtcttggcctaaccctaagtccccccacggatcaagggggaatgtcttatagaatttcatctggagtacatatggaactcgtgacgaatcacccacgttatttcgtaggaacatatgtaacatgtcctatatagcatggatgtaccccgtagactatgcaagacactctgtattatggatccgaggtcgatcccaaggcaacgagtgaaaaaaagaataaaagaaaaagaattaaaaagaattccagaattaaaatccccaaatgaaacgtaacactccatatgatgccctggtcaatttgctcggcttcttcactgcaaatcagggcatcagattcgacatgcttggcagcctccccgcatagcaaagtttataaaggaaataaatacggagtcactgctccgtacaggtgttggagagtcgaattggatattgattttctttaaataaatcacgcaaatgactggaatatacggagtactccgtcctccgtaatggattctgatttataggctaatgcgttcacagctagagactaatgtagcctgggtttccattacgcattagattcacccaagaataccctagcatgtatatattaatgtccttaatatccttctaactaagttactagtttcccctctttgctcagctcatacctggattgccatcgaaagtgtattctctgatcacacgcactgcggtggaccaagcacattttcccgtacgaatttcctccccctccatttatacccgacagcccctctcgtcagcgcgcatcggtgctcttatcggatgccctttcttctatccatgcatacctcattcttcacccaccaggatttgaatggctctgaggtgcaggagaaccaccgatcggatattcccatctcttcattaggcgttcgtggctccgtcatccgcggcagcacgtccagtgccagcaccgggattagcaccgacgatgcctcggtcgattcactggattggaatagcgaacactcgccggaacaagaccagccactgaaggggtattcgcagttcgatgcgcaattgaatgatattatggagttgcccaaggtggaagaagtggaagaacttggcgatgacttgttaaatatcaaacaggcggatgtggagtcgggcgctcccgctgttccacggaaacgtggtcgcccacgcaaacatccactgcctgctcccggaggccaggccaaggtcaccaaaggtcgctccaagacgggttgtataacctgtcggaggaggaagaagaagtgtgatgagacaaagccgtcgtgagttgtcgtgatccactggggtgtcttgtctaacaggggatagttgccaaaattgccagaagaatgcggtcgtctgcgaaggctacccgctcaaggagatctggaagagtgggagacagagagtcgctgatggtaggtgtagattacattttacattctaatcttgactgttcgcttgagacactaacttggttttttccccctgtagctcgatcccagtctctgacagccgtgccgcgcagtttaccccttctcatcgacggtatcgaaacggacgtcgaccgtcgctttttggaccattttgtgtacggcttcagtcgcgtcctgacgctcatcaacgatgattcaaatcccttcaaggagattctcctcccgatggcgacgcaacatagggggctgatgcattcgttgatgtgcttgtccggatcgcatctctcaggtttggatcccgaacccaagctgaaggagcggaaatactttcatttccaccgcgctattcaagatctgaaagataatatcaatgcgtcatcatcagcccagagccccaacgaggaggatcgattgttagtcgaggacccgatcatcgcatctaccatcgccctcagcttgaacacaatctgcgaaggtgaaaccaacggcgaataccgaccgcacatggatgccgcccggtatctgctgttgtcacagcagccacggaacgaaaaattccgccagttcatcgtcgagttcttccagtaccacgacgtctcaaactccctcacctcgcttgaccgccgtcctaatctcttgcaccccgaactgcacatgcccaacttcgtacccggcgtgtcagcggggatgttcctcggcgtattcgatggtctcttcaactacatctcggagatcacccagctccgcgaccgtatccgcgaacgcttcaacgagggctatgagccagccgtggactaccagacgttgagcgaagccgtttccatcgatatggccatccggaattgggagacctcgcacgagcccgataccccgaactggtgcctggcccaactataccgccagtccacctgggtatacctgtaccggacgatccggccctcgcgaccgagcgataaaatcgcgcaggtcgtcaacgacggactcgactatctggaccagctgccgcaagatgcatccgctttcagtatcgtgctgatgccgttgttcctgcttggttgttctgcgttcgtgcccgagcagcgccgacgcatcacgcagggcttcgagaatctcaaatcctattctaacctccgcaacatcgagcctgctttcaaggtcgtggtgcgggtttgggatattatggatacccggatgcaggatagttgggactgggaaaagatcatacgtgatatgaatatggatttcttgattacttgaatatccttttctcccctaccttcttactcttcttccccttacccttctgataccctgttatttcttatttctacgttatttatttatttgtttctcgttgattattacagtcttggaaggggattcttcgtttgtctcataccatggggacgatgatctcgatgttgtaccatgtggcgttttgatttgatcaccgtgagtgatggtgatgcatatctatatgcatctcggtcgggggatattactattatgtttgcatttgtggtttttttctttttcggcttgcgagcgttggtgcgccgcgaagtctccgtgtcaaaggcgtattctctggctgcattgcatggccgacatgggcgccaagccggctttcctcccgattcaaaaaagggccgagtcggtgttatttctgtggtggatgagtgatgtcgagtgggtgactgaatgatctcatgatggagggcgtttttgtgtctggaggaggcctggtctggccctgctatttgatttggtttagctgattgtgtatattcagatctcccttgggtttctcgcgtggcataataggaattgggtcttcatccttgtacagtatcggatttgtctttctttcagatgtattggggaggatcatccagtctagacctggccttgcatcttctactttaattctttgttcttcactggctgttccgggtacatcctgggctataatgcagtcagattaatgctcttacgtatattgcgggtatgaatacgagttaagacttctaaaggctttggcgtcacatttgtgtttttactcttcgtgaatattagttgaataccattaacatattcgagcgcaatatagtcaaggaggtacctataacagctcctcgcctacgtaaggaccacgttgcggggtgacagaccattgcagaccaatcgcattagaaatcggagactaagaatagtccggggtaggtccgaggcaaggagaattaattttctcagacttacatgactgtgcaggtgaattgcaagggtctgatgtcgaattagccgtcccaagagtcgttttttcttttttggcagaatccggggatcatcctgcagtcatcccataccccatccccatccttgtaactccagtccaccatctgcatagcacatccgaacagggtctcttgtgcggggggatggccgctacatgactcgtgcccaatcctgcgacaccggcaaaatacaccatggaaaaagaccagatcatcaccgaattgagcgcaaagcaactcggtctccctgcagatgtgcaagatactgcatacaatctctctctgcgtgcagtaaacccagtatgcatcaaagtccgcaacttatcgctcgaagtcaacaccaccccgccaatatgggagacctcgccatcacagatctggcagcgcttgcggggtcaggggcctccaagaaccagcaaaacagttctggacaatgtgtccgcctccatgccaagcggtagcctgaccgctataatcggaagcagtggctcgggcaagacctctctacttaacttaatggccaaccgaatgagtctctcccgagcaaacacatgcggaacgacgacttttaacgacaaccccaacatcgcgcacatccgcagcgcctacgtcatgcaggaggatgttctaattccgacgctaacagtccgcgagaccctgcgctactcagcagacctgcgcctcccaccaccaacaactccagctgagcgccacgcaatcgtggaacaggtcatcctggaactaggcctaaaagagtgtgccgacacccgcatcggcacgaccgcccacaagggctgtagtggcggcgagaaaagacgcaccagtatcggcgtgcagcttctagcgaatccctccgtgcttttctgcgatgagcccacaaccggtttggatgctaccagtgcgttccagattatcaggactctcaagcgtctcgctctggatgggaggacggtcgttgtctcaattcatgcgccgcgctctgagatctggagtctgtttgataatgttgttctattagccaggggagcggcggtttacagtggttcggtggaagagtccttggcgcactttgaggagtgtggacatgttcttccgccgttcgtcaacccggcggagtttttgatcgacctcgctgccattgataatcggacggaggagcttgaggctgcttcgaacctccgtgtggaacgactgagggatgtgtggcggttgaaacagactgcagcggatacagaggcagagggcaaaagaggagagcaaacaccgaatgccgagatcggtatatttgagactggagctgtgaagcaggtctcatttcgtcgacaattccgcgttctgacgtctcgcactttcaaaactaccattcgtgacccgatgggtgttgctggtagtcttcttgaagccgttggaatggctgttattaatggctggatcttcctgcagctcgacgaaagtcaggcagggattcgctcgcgcgagggcagtctatacaccgctagcagcttaaatggctatctcattctgctgtacgagacctaccggctgactattgatattcgtttgtttgaccgtgaacgaaacaagggcgtggttagtgtgccggctttccttctcagtcgacgagcagctcggttaccattggaggactttccagtgccgttgattttctctctcatcttctacttcatggtgggataccggttggatccgggacagttctttatcttcttcctcctcaccctgctcacgcactacattgccgtaacatttgctgcagtggccattggtgtagcacggagtttccctgcggctagtctggtggcaaatctatccttcacgttgcaatcctttgcgtgtggatactttgtccagtctaaccagatcccggtctacgtgagatggttgaaatggtgtgcgtatacattctacatctttggggctctgtgtgcaaacgagtttattggacccaatggctcggaactggggcagttctacgcctgtccatattccgataatcccctagaccccgcctgcaagcaatataccgggcgctatatcatggaaagcctaggaatgccgtcgcagtggatctggcggcctattgtggtattaatcgcgtttgccgtttgccactatatcttcgccggtctgttgctccaatataaccgcttcgcgatagatgttgcccaggcacgaaaaaccgaaggagacccaactagtggaaaatccaagctcgctatacgcccaagagaggaggcgcgcaaagtggcaatatcgcttgacaagtacgcgttggatattcgaaagcgacaatacccctgggaaactgcgaaaacactccagattctgagacctattaccgctgagtttcagtcaggcgagctgaacattatcatgggcccatctggaagtggcaaaacatcactgctcaactctatagcccacaggctgcacgggtccgtagggacacaataccgcgtccatggtaacatgctctacaacggcgcggtaccttcagaaagtgtgatccgttcggtgacatcctttgtaacgcaagacgacgacgcactgatgccctcattgaccgttcgagagagtctacgcttcgccgcaggtctacgcctcccaacctggatgtcacgcgaagaaaaagaccgacgcgcagaagagatcctctataaaatgggacttaaggaatgcgccgacaatctcatcggtagcgaactcatcaaaggaatcagcggcggcgaaaagcgacgcgtaacaattgcaatccaaatccttacagaccccaaagtcctcctcctcgacgaaccaacctccggcctcgatgccttcacagcaatgtccataatcgagctccttcacagcctcgccgccgaaggccgcaccctaatccttaccctccaccaatcccgctcagacctcttcacccacttctcccaagtcctcctcctagcccgcgggggctaccccgtctacgcaggtcccggaacacaaatgctcgcgcactttgccgagcagggccacgagtgtccacgcacaaccaacccagcagactttgtcctagatctcatcacggtcgatctccaacaagcagaccgtgaactcgtcacacgcgagcgtgtgcagggtctcatttcctgctggcagagtaaccctctcgagttaaggctagaccggcagacgtcgcagattgccacgcctgcggaactgggcagtctcaagcgccaaatgctgccattccgcgtgacatttcccctggtattgcatcgctccgtggtcaatttctggcgccagccgccactggttatggcgcggtcgatgcagatcccagggatagcgattatcatggcgcttttctttgcgccgctgaagaatgattatgcggctgtgcaatcacgtatggggtttgttcaagagtttgcggcgttgtactttgttggtcagcttactctattgttccccggctctctctgctggatgtcgtttttgtataggcaggctaatatcctaaataggaatgctccaaaatatcgctatttaccccagcgaacgagatgtattctaccgcgaagaagcagacaactgctacacggcatcaacatttatcctcagctacaccgcgatcgaaatccccttcgagatagtctcatcactaatcttcggcgcgttagctgcctttgcagacaacctgcagcgcactgtcacgatgttcctcatcagcgcgttcaactgtttctgcataatcagctgtggcgagtccgtgggaataatgttctgcacgctgttctcgcacgttggcttcgccgtcaatgtgacgtctatcctgctctccatttcgacgatcctcggcggcgtcatgagtcttaatgtcaacaatgtgctgcaggcgctgaaccatctgtcgccgattaagtatgccattgctaatctggcaccgtattccatgcatggccaggtgtttcattgctccgatgcccagaggctcgctaacgggggctgtcctgttgattccggtgagcaggtgcttaagctctataatctggataagaatgggccgatgaatatcatggcgttgggtgtttgtacgatcatatatcgggctgttgcttatgcatttctcaaggctatgaggtcgcataggctcatggaacggtggagggagtggcgggctcagaggaagtctagatagatctggatctcctttttgggtggattttgtctgtttcatacttgagataccctttcacatgtggcttgctttcttttcaaatctatgcgctgcactcgactatatcttgataatgaaagtctgtagaagagaatcagaagatgataaacctatctcatcaacctggacacgtacacatgtctaagatggacatagcttgtattgtgtccctatgtgtaagcaaacttggaaagtgcgagagaaaaggaggagcaacataatactaaagactcaacagcgggtggcctagtggtaacatgcatgtgtaccacgagggaagtgccgaagatcttccactacctggactgttcctgttcgactctggtcgttctcgcctttatctcttttttttctatcctttttatgaagagagataaaccaaaagcctcaaatcacagttgttgcctgaggcattcaagctcatgtagtattgatagcactttcctttctgcctttcctttattcctaggtgcccttttcacaatacactggtaactctgatttatgggccggaatctacgaagaaatgttgcattttgtgttactttgcaaacagacaccccatctcgacaaacgaacccaacaaacgaaccgttccataaagtcaatacttcggttttatgccatgtatataaaccatggatggcctttccatcctattctagtagactttggatctaaaagactataatccagtttgatgttggcaacaatgaaacttgatccagatttacttgatgcctccaaatttgaggtctagacgccttggcttccaaccattacgccaaagccaaaaggccggcgataaaggaactctatgcgattaagtacctttgacaccaaacctagtttgcacaaagataactctaacttgtatgaagctgatactaccaaaggcatggtcacgtggtcatccatacccgccattgagcacgatgtgtacattgcacaacgcaaagagagtacattgactaatatggaaggttgacccggtgtcaactttgacctaccaagatgatgcctaatcaacggtgaagcctgtgactcacagttctacccgagagcacccggtacacccgactaggcaggcagcattgaatccctcgtgaaggccaaatacgaagtagacggttcaatgggaatggagttggcaggggttcacccccaccctgtaacagtggttctagactgcgcatccaagaatcaagccatgccgaggtgaaaaacggcaatcttggcatggggatggaatactaaacgggaaaagagttggagagattaagcataaccggagtccattggcggaaataagcttaataatcggaatcctccaactgccggttagtccccgttggttcccagagatttaaccgaacgttccacggttgacgacgggcggttcaaccggacaaccgatgtcgcccctcaacaggaacagtcctgacagatacggtccgctcaacgtgaatggataactcggcactttgagttatgtacctgccttgagagtttgtgtacctgcctgccatgagttcataccacgtgtacttgtactggattgtacatactacccacggagtacctatgacgaaagtaatataaagcacaccaaaaccgggataaatgacaacgctgtacaacttaaagcgttgttcgagagcgaaaagcgctgatctgagccaaattcatccgacttgattccttggaggaataatatccagcaaatcagatcgaggctccgtcggaaatctccaatcgaaaatctcaacgctacgtggccccgcagtggacacttttaaacgccatccgcccatccgactggcggtgggccctaagatgtggggccagatctacaaatgggcgatttgtgtgttggggttgtcaagggtccctgtctatcactggttctagaacgtgattaattattccttcgcactgagtatgtgttctgtatgtgatcatttggtggattcggggatcttaccggtttgagccttcgctcgtgctctacagcctttttcggggcttttttgcctcccagagaattcttcgtattttgaggattcctatgggttgttctttagggctggttttttcacgtctagtcagatagtttgaaaatgctaaattcgagtagatttctgaagtaaagatcgtatatttcgtgtgtaatcttcaagatctgatgatcatctatctattcacaagtccatctattttctcccccgccatatataactccctgtctatattcaaccattcccattcccattcattccaaggtgggggggtatttcggaaaaccgtaagaaatcatagctcgtgacgagacatcctgccccagcgggaatcaacctgctatagatggggagaagacatgtcgaatcaaccgaacatgttgcataacaaaaaaatcaccaatctcatcatctcaaaagggtatcaccacctggggtgatataaaagaaagaaaaaaatctgccatctagggctagatgtgggtgtgaaaggtatgtataaaagaaaggatgcacagttcaaccggcagaaacaaaagtaaaccagtggacaaatctaggactggccaatgaagagatccagagcagtgtcgatggggcagccgtgggtggcgtggtcatcagtgggctggaggtacgcagcggagcaagcggtgtcaccggccttgcaaatagccgtggggcaagtggaggtctcatcggaaggcacgacggagaagccttggtcggtgaacttgttgctgccggactgcatgtcaatgcaagacatatcccagaagatggtatcgccagcctcggtgtactcgaactggaggacaccgatctgctctggctcgagggccaacttgatagagatgccaccgccgttggggttggtgcgccatgtctcggagtaggtgccaccgttgcccgagatggtctgcatgggaccgacgtcgccggccacggaccaggcgtagacgtcctgggacaggttgttggtgatcgtgacaccgccgccatcacggcggacgatgcccgagcggcggaccatctcctggggaagggccgaaacaatggtggagaagagagcggcaaggccgagggtcttggtgaacatcatcttgaaagataggaagatgtatatagactgatgtagaatggagtgatgtggtctggtcgacagacgtaaagaatgaaacgagagtcaatctcgagactgaagagaatgaataaaaaagagagaatgtactggtagtactttgatagtgaatgtgtttggaagaacagaaatccccgggtgaacgaaggggtttatatagcctctgaactgagagaggcatatagacccaggtacagttgaaagaaaacgtgcaaagccacccatacttcgagccatggatcggttcagggaattgtggggcgatccaaaggcaaaaggcgaaaaggcgaaaaaaataaaaagcagaaattcgagaaaaaaagaaagaaaaaacagaaaaaacagagaaaacacaaaaaagagtggaacgaaaatctcgcctcggcttctttcgagtttcgacagagagagcccagaccggtgagcgaagctttgtatacatccaaaagacatccaaattaagtgcgtacaatcagatgatatcagatatatactacatagttataacattattcgacttatcaactgcataaagtctgcattgctaccagttagggcatcaccgccacagtttatatacgaggtaggccatagtctggggcgtgtcgacatagggacttctgcgtgttcatacaacttaccactataaaattggcccactgatcgcctaaaagctacaactcacaacgtggcaatagtgcccacaaccccccaaaccccacacgtcatgggccgtctgaccgcatccgcggttctaacagatggaaagaattggtttgaaggctcgaaccagcaaaacccatggcaaagaacatggtagaagctcgactgcatggctacacagccacttatcgcacttttttcgccaggaacgactggggatttggagctcgttctgtggttgtggtggccactattacaacctttctatcccatttctcggatactagagaaataatcgtacattagaaaaaattcagaatctagaatgatagtctaaccaaattgaggcaaatatcagcaagcaatgagtgtcgatgagaacccagggtgcacactgtacggagtacttcaacatcataatgtggcaagtaggacattaccaagcagacaactatattgcccaatatacaacatacgcagtcttctaaagaatgtctgtcaaccgagccaatcataatatctcctatagattattaccacaattaccaattcgaccggcctggctccattctcgatgccaatgctcgataattcttatacaaactaaatcctactaggtaagtgggagctgactctccacagttcagaccctcttacaagaaaatcctacaacatataaactttatgtgttggagtatgtagtcctggacccctgtgtcaaagaatctaagccaatgatatctttatcaacaccccaccagacgcctctgacgttgatctagtgcccatacaaccgactgtgcctggcgatcgagtctggattcttttggcaaaagcatgttctacatcctacattgtacataatacggactactaactctatgataaagttttcactaaaaggttctgaattagggcttaagtttttgaattaatcaaatccgacctgagttaggcaatgggatgtatgaccatggcatttatcgccatgtgcatagagattatgacttgaagaactctcaataataaaagaaaactaatcctggtatacacaaaggatttctcccatctcccaattattctgtttgttttttttttccgaacttaaccctcgatcactgcccctgtaagccactatagtccgcatcggagttccccgtgggccctcccagtccgcgaggaacaagctggacccctacccccatcaaccccaccaattaacccccctccacttcccttgtttgcagcttacctgcagtctagatccgggaatcaaccggtaagaaacagtgcctggaatgaaaggagggatggaagatcccggatcaaatatctaccaatacggagcgcgcatggccgacagactagccaatgcgccctcgctgccatcctccttcttccggtgacctgccagctccaagttaatctggcgatggatatgcaccagccagtcaacgtagctctgagcctcgttattccggtcctccagcaggagtcgggcgaactcgtattctgctccgtccaggccttgccgggccagttggatcgttacggacttggatccgcgcaccgtcgacaaatactgcagcagattacgcacctgtgcgttcaagtgtgtctcgagcacaggcagggacgaagtgttggggttcaggccctggatggagtcgtggcccggcccgaataggtcttccagtaaattgggtgagacctgcgcgtgcagccaaaggatgactgcctgaccgttgtccacgatgtagacaccaccttcttcgatacgggagaagctggctcgcagggagggcgggatttggagctgtccctgctcgttcgcaaatccatcttccggctgcatgttgtgcacggggataatgcgagggtagaggtacaacgccatttccgtgcagcccattgaccggatcatgcgcatatcatgcacccgccggtctgatgactcggggccggccttgaatgctctcgatttgaccaagctgagcatgtacatcgagaactccttcagattctccggtagaactagctggccgggagggtgcgagccggagaagatcttgcggtatccgctgaaaatatcgactgtcttctctgagatattggctcggatgtccttgaggttcttgtccagggtcttcgaagcggctatgatggtatcagtatacacggtcaacattttctaatagatcgtccagcttaccctctttggcaataaccgagactacggcatcctggtcgacaaacttcatcgtctccaggcctccttcattcactgccgccacaacattgatacatcggacacggcgttgaccgtctgcggaagtgtaaagcaacgcggcctggaagtgcgcatctagcttgggatcaagtttaccgtcgtagctgaagagcacgccgacagccttgtcggcatcgacaccggcaatctccagatcagcgccgagtgtgtgctggacaaagtttccgtggtaggcggacacttgaagtccattggagcatcgaactttcatcagtgtttgatagcccgtctcacgagtgacggcatgagcgatttcatgtcggagcttgaggagatcgcgcggggcatggaaattagggtagaagaaggtctcgcctccggtgagactagagacatgtcctatgcaccatattagttggctctttgtatagggctgaatgacgctttcaacataccaattgttgccacatcgaggtatgtgccaccaggggctgccacgaacaaatccatgcccacaccggcttcagccaacttgcttgccgtcttcttccaggctgggttttccgtggtgaaaagtttccgttccgcatccgttccataaactttaggatcttctctgatagccaagtgtcccgggccgtaggtaggtaagctagccaccgcgcagacgatcttgccacctgtagcctgcagtgcggagagcgccgagttcaatgtcggcagcaaagctgaatcggggtttttgatagaagagaaaattttgggtatccgactgagaagagaagtgatcacagacctaaatatcgttagtgatccgtaggagaccagaactataagatcgcatacttggactcatatgggtccacaaagagaccttcgctcagcggtacaaatggctcatccaaatcggtcatgaccatcatctgcgcttgatccaatgccgcctgcgaacgtgttaatagaagaagggtatcgcagagtgtggaacacatacggacaggttgtagaagtgcacctccttatcatacgtaacaatgccgacctttgccccaacaggtaattttcgtggtaattcctcgccttcggcgccctctgatgcttcattatcactaccgtacagagcatccttgatacctgcgcaaacacccttgaggaaacctcgatgaaccgactctctgctgacatcaattaggaagagggtttgaaggcccaccggctccttgttccagtattccttcgggaccgtaaactccacggttcccaccagtaattcaggacgttgcatgcgatccacacgtccaccggaagggtccagcggcgcaaagtattcgggaggcgtatcattcgggaacgtgcacatattacagacgaacttgctgccgccagatcggaaggacatgaatgggttgatatatgttcggcatcgtcggcatcgtgggggaccaacatccccgaagtccagcacggggatcggttgttcgccgggatctagaggcgcgagaggctgcaagatcatacccaatggcaagccggtcgaggcaaggaagtcagaggcggaagggatgttattgagcgttaatcgagcgtatttaggagaggagttgccttggtcctgagccacgaacgggatcgctgctggtggggggaggtgttgatccattgtcgggtagacatggttgaaatagtaccgagcgggtaggtcgcgcgatcgcgggatgctaggaatatgctctgggtcaattcgccctgaagtaggcacagaacctgcaccactcgtcataccaggtatgtcggcgacagactgcccagatactaaccccaccgccggggaaactggtcgttcagcatattggttcaagcctgtgtttaggaactgcgattgttgttgttgctgctgtggctgctgcaagcctccttgatccatgccggtattaaattcttgcgcgggggttgctgcacccccgatgtcgtggtgagcatgacggtgcttcttccggtgtgtcctggcccccgtatctgctgcaattcctagcccgctcatctgggaggctaagcctgccataccaggatctcctgctgtccccattgcttgttgtggtgcattgtacgcaatgccgggactcgccaaattcggttgttgtggtgagccgtaggcgggccactgattcggcgctgggttggcgtaaggcgctcctggttgtggagacgcggtgctgggaggatacccagcttgatattgtgcagggggagcctgagccatgtactgcggattggaggggtcttcgccggatccctgacccattgtgttatacattgaagggtcggccatggtggatcatgccgcggaggtgtgaggtgagagaggtcacacaagggtgggattgagaaatggagagataatctcaacaaatcatcacgtatggaacagtattagagaataacgaataacaagagcttatgttgacgatataccgaatagaccacctaaactcactcggatttacgtacttccgaggatattcacgtggggccttatcgttgtactttgtgacttgtatttcctcttcctcttccttaaggtattatagaagacatcctcaaatgaaattgtcatcctttcttaataaaatctaactagtatgacccgctattcgtcactctgcataactccgtgttagcgaccagccggagaccatcccactctttgatggctccgaagccatacatatgtcaacatcgtctccagggctttgtcctcgtctcagcgccttaggcaaagcaattcatccttgtatggcttggccgtttttcgaggtccaatttacgcttatcatattctctccaatcacgtcagatctctaatcctggctccggctcaagctccttaggatacatctttttctggcgtgttcgactcaccgtacttttcccgtgcttgatggctcccctctagtccggtttcctgaaccgacgacccctgctctttacaccgtagatataatacaagacttctgtaagttccggcatttctcttttctttttcccaccttatctttgcccctcaagctccttgcatacatatatatgcattggtcgtatacctactccttatcatggacctgaccgcaaaaccagacccggatcgcaaacatcagacagaaggagtagatacaccagcccctcttcaacctacaatggctactattcacgatgatgatgagctgttgttggcccgcattggctataaacaggtattggcgcccaacacctggtggggatcatagcggggcacaatctgataacaattatcctgaactaggagttacgacgagagttctccaaatggtcgactgtctcatatgccatctctattcttggagtccttggctccgtgccggcgacattcggtgcgccgttgtcagctggcggtccagcaacagctgtatggtgttggttgatcggttcatgcatggctatgtgcattggaagctccgtggcagagttagtatcggcatatcccacagccggagggatgtactttgtcacaaagcaggtcgtgcctcccgatcaggtcccaattttctcctggatccagggctggtgtaacctccttggacagaccgcaggagtctccagtgtggcatacacggtcagtcaaatgttgctggcctgtgtcagtatgaattcggatcttgtagatggcaagtattcgtatgcaccgtaagtcaactagcccgaatcgctacgtttctaagctgatatattcaaggacggcgctggagaccgttctagtatcaatcgcagttctatgtattcttggggtgatttgttcgttgactacgaaatcactacatcgaattatcctatggtttgctcccataaacagtgtgtatcaagagaacttcgtcgtctgacttgtactaatgaattcacagttggggcgactatctgtatatgcattgcgctgcttactcttacccctaatttacagccagcctcttgggtcttcggtcatttcactgatggctcaggatggggctcaaaagtcttttcttttttcctgggctttttatctgttgcatggacaatgaccgactacgatggaacgacacagtatgcgactctgaaattctctattaattcatattctaacctttcatctttattatagtatgtctgaagaaacccatgatgccgccgtgcgaggaccagttgctatccagacagccgtcttggtatccggggcactcgggtggctcctaaccgtctcaatgtgtttttgtttgaccgatttcgagggaattctaacctcccctaccggtcttcccgcagcccagatcttcctcaatgccggtgggaaacgaggtggcacagttatgtgggcatttgccattttggtccaattcttcacaggctgttcagctatgttagcagatacgagaatggcctatgcctttgcgcgagacgatgcgcttccattttcaaagtaggattttcttacctttgcacccgattgaaactccgcactgatacaatataggtacctttccaaggtcaatcctcggactcataccccagtcaatgcagtgtggttcgtggttttcttcagcgtaggcttgaactgcatcgctatcggctccacgcaaacggcaaccgcaatattcaacatcactgcccctgcactagacatctcttacgtgtctgtcattctcgcccaccagctctataaatcgaaggtcaaattcatcgagggcccttttacgctgggcagatggggtacttctattaactatattgctgttgtctgggtcttgttcatcagtacaattcttttcttcccgccacagcttcctgtgacacccgcaaatatgtaaggcgcttgaacccggtttatattcaggtatgaaaaggtatactaacatgactctacctaggaattacgccatctgtgttggcggctttattgccgcttttgctttgatatggtggtgggttgcggctcgagggtaagaaacatctaaaattaacttatacttccagcatcattcaggtggatactgacatggcctcctttatttctgcagaaagtacactggtcctcaaactaatgatatcatacgagaaattcccaccgaggacgatggcgacgattccgaagagtcaggcgagatcactgtttagatgacatattcattccttacgcacaacgacaacttgcgagttcagttttctagattatggattagatatatattatgttcatgtttgtttgaagttttaggcattttagaaatgggtcatgttggtttcgggttaaattgtgtgtcgatgataatgttgtttttgaatataatactacctgtgacattgacttgagcaaaccagtagaagaaaacctgtttgattatgaatatcttgatttcggaagaaagaagtggctatgaatgctttgttgaccatgaagttatacaccggaaaaagatagaaatacatgtcacgtgtagtcttagctgcctgcaacaacagccaggccctcgtagattttccttttgacagcaaggaagctccctattccacgaccaccaggccgagctagtgaagactgtgccgttgcttcgatttcaatcttgcccgttccagatttgcgcacagctacggacttgtcaatgagaagcgttccctcgcctcggaactcggctgtgtgaccagcggattgcatcagcttgcgaagatcagccaatcgcaggtcaccgacatgaagagggcgagccatagacctggttcccgcggccatgctagctgggagagtgtcaagtaaaggatagacttctaccttctcgattattttggtgtctgcttgttccaatgtcggggcgacggcggaagaggctgcttcgtccttcagctgcttcaccttcttgcctgatgtttcggcttccccgatctcagcaggctctggccctctcaactgtgccatgagagcaacgacgccgaggctgcggacgtgttgccaattcaagcgtcgaacgagcgtgttgctcagcttgaccatccaggcatttgtatcaacacttgcatcgacgacttcgccgttcgcaggagtgaagataatggcagccgagtcaaacgcagggtcagaaaccgtggcgccgaccttgactgtcagcagtttctggcattcggctgccaatgctgacgtctcttctttcatgctaccaaccaggatcaatttttgaggttggatcagtggaattaacatctccaagctgcgcttgtcgtgcaagcccatgaagtcgatatatgcaatcctagcgttgatagtgatggtctgggtatggtaaacaaccttcgcaggaccttcgaaggactggccttctacttcgtcctcggactctgcagctacatcggcgtcttcgtcatcagaggcaaggctgagatcatcatcttcaatcttcttgccatcaatgtgaggacgcttccgtccttctgcaccgccagacaacttgcgtccatttgggccggctgcatcatcccatcgtcgtttttggcccagcttagtctcggcgtcggtacgccgttgttgcatatcaatctcttcacgttcttcggctcggagatactcttctggacgaatgaattctccatattcgtctcccttctttcttggtgccacgtaaggaaacatgcgctcgcggcccttcttgccacgaacgtcgtaatcataaacgttctttcgacgaagaaggatgttgatgcccaagtcttcgtcactgacggcaagtttgcttcgagtagcgtgtgcaagtgaggccgaaaagttcagtgcgcgaccttgctgttcaggatccgagtcttcagaagaggtagagctcgatccgtcatctagagcatccgcagcagtttcgagagtttcttggccaagtgtttgagatgtgtcttcaagttggcgtttggtcgcgagatactgctggtatattagatgttccccggtatcgagaggggctcgctgcacatctgtccaagacaattctcgtccaccgctgtggacttgttcgatgtgttcgccgtctgatgctttttctagagccacaccatctcttcgctcctcgtaccactgccaaatcatacttccaatggttgccgaactctgtgatggtttcgattcttgagtcgtcatatccttgcggaaggactccgtcagcaataacagattgttgggtccttcggccacttgtcgaagcgcatcctttgagaagccccagtccattgatgtattggacgcaaggattaccttaggtccaggctctgccaggagcttctcaagacgcttcttgcgctcaatgatcttgagatgtttgaaagtgaatggcccaccccctttgttagagctcttgtcctgtccccccgtcctttgcccgttcgtgacgtctgtgctttccgccgcttcaaattcgcgaacaatgttctcgtccatccactccagcatgcttcgggcgagtcggattgtgttcgtaacctttttgccagccagatacaacccggccccttgaagaacatcctctttgtcgccattcgcggcatcgcgccaagaatgttctagtgcgtaagctagttcaagaacccgcgcacttgtgtctgtagggatgagaactgttccacctttcgcaaggcaacttcggatcatgtcgaggaggagatcgtctcgctttttccgacctcccgaaggtgccagcttatcgcctcctgttgtactacagatcaaggccgtgggtttacgtaactgttcaatgacttctgttccactggcaccagagccaccaaaccacgcagcacccgcgaccacactctcacgagcttggttccaatccattgcatagacaatggattccagcccatgctgaatatgccatatcgttccaccgacggtgtgaccggcattgtaggctgtgagagtgagcccgttcaacggcggggagaaaggcgatgggagaggttggtgcggttgggaatatttgagtggctgaatgagagagaagtatcgagatatatcctccgctgtcggcgattgaagaagtattcgacttgcgctgccagtggcctcggtgtctccgcctgacacagtcgcagatcctgctgacgatgcgcccggctctgagacagaagccttcggtagaaatgtggcagcgagcggagcggaggcatagaggtcttgtaggagggtacgaccgaaagcgatcacaggattcgttgcatagattgggatttgcgtgaagagggggaatgttcggcagcaatggactagagcgccaatgtgggcgggtgtggcgtgtgtcaagagaatgagagaaagcgtaggaatatgcctgattatggtattagcccatctgaattcaaaaaccttggaaggtaacccagatcgcatgctcacttctcaagttccgccaaatcaagggtattaaacttatcatcccagccaacatccactaggattttgatgcctccatcgagctccaagatagactgttgtgcctttgaagatgacgactgggcgccaaggaggggagtgaacgtgaacatcttgagaatctgccgttactgacggcaaacctagcagcgcgattgttctggaccagggatgcggcgacagatcagtcacgatcaatgaggtaatgcctcgatgtatttggtcaattccaagattgatccattatcccatatcccagggtgtcaaatcgatccgactttcgcgaacaaagacaaaagagataccaggcgacgggcgagcttgtttgttcggtttgcacgtgacgtctagcaatataaagccgaactattgtataggtcaagtccttccctcgacacctttcaagggatttttttcaaacttacatttcacctagccgtggatagtttggtattgtatactggctcctggtgtttatccgagtttcgtgtaatcaagcgttgccttgcgattatgccatattctacaaccgggcttgaacatgcaactatgttggacaatatacatgcttcgctccagactagtatcgtaaaaatgtaatgctcaccagaagaatgatgaaggtcagataaaaatatgaaagaaactaataaatttgaaggaaagaggcataggcatcccaaactccgattctatataaatccgattaaaccacaacacccatagaaacaaacttcactaccaaactatggagagaaggtacacaacaggtttatctaaaggaagaccactgggctgaactgactgactgctctgctgcagatgctggtcttggcctccttttacctcgccctttgctccgtctttttgatctcaagagctttgtgcgcgccgcaggcgtaggaatttccccaatctaatagaatatggtcagcatggctcctcaaaaacctaatcaatggattagggcacttactggatcctgccattgactgaaaggccggttcctttcagcccaagggggtagcgtagcatcgacttcgggtttgatctcatggcccaccaattcctcccctgcccagactctggctcggcgaacagcaatagggtcagggaaatgcctcgccctccgcattgggtcattgaggtatattcttatctgttctaggaacctatcttgcagattaggcggaatctcaggactaggtgcgtccgcctgcggtgttgcacccgcctggtttcctatgggtttcttcagtgccaccggcggcctgtctgatattttctctgctgcagctgctcgcatttcgtcccgtttgtcttgttctgctcgagcaaatgacatgactttatccaccgtgatctcagccgctgttttccttcgaaccgcggatggtgatggtattgatggtgactccatccgtattcgtttacttgattttggagcccctattatttcaagttctctttttctcgcctctttctgtgcgtcttccagtgagagctgtgctcggcgctttcgctttgacgcttcgcgatgtccaactccgcctagcctctcaacttgaacagaacattagcataattcactagggtgacagctaaacatattgactcacaatttttttgcttcttcctataataccgttcaatctgcccagggctgaatagcccatcgtgggatactggggagaggttattcgtcgattgatcgctattatcgtcagcggtgttgaccttgccaggctcactggtcttggaagaagcgctgacctcgctgttagagccggagccagacaagaggctatcaggtgattgctctcgagagtctcgagctgagtgaggctcagtctgaacgtcatcgccgtcgccaaagattgaaccgtcttccgagattgtaactagagcctatcagtcagcgtattgtccgaataagtctgtagtatgcagcatgtaatgtcaaagtggttaatcctcttccccagaaacgcgacaaccagtcgtcttgggtatgactgcttctatgtatcgtgccccacagtgtagttgacactcgcacaccttccgaagggtctattgaaaaggcaaacgaacacgagaatgaaattcgagtcaaactaagcacatttgtactcaccacatgaaaccttttcatcatttcgaaaaggcgcaggggctgccggttccgaataagtaccctctggatcttgcgacttcctgggctcggctgtgtgactttcttcgctgccctgtttgccgccccgttcgctttccgggtccggactggcagagcgcgaggcagtcggccattcttccgatcttggtcgattgtagatattggacgccacggcatgcggatacggtcgcgccatgcgatcgtcacgcggtcggactgccatgcttggacgatcataattagggaagtaaaaggccgcattacttgactttcgactggattgctcggaggttcctgtcgcaaagtgccttgtgatgggcactggcggcagaactgggtcaatggccacagccttgagcaaagggccctgggctagggaatcatagatctgctctcggagctctgtatgggtgagagtatattcgaggcacaggtacgcaagttcgtaaagagctgggtattctatcccggtccagttcttgaagtcaccttcttcaaaggtccactgcaattctccgaagtccctcgcaccaccagttctcccggaactggcttttgaggcatgttgtttggaagggacttttatgtttgcgctgttttcgctttgaatgatcacccaacgaggctgtggtgcagcgcctccaatatagatgggtggtagaggtccgtgatatttgtcctccacaccttctgggacacgaagtttctccatgtacgcccatttcccaatttttgaagctgggcgtttgaatgtgggccgaccgatttccacattaggaaccagagtcttaaccttgcgtcttttggcctgtggttcatagttgtcttcttcactttcttcgtcctcgtcttcgtgatattgttttgttgaagccttcacggtagctgcgctaacactgctctttgtagccttcgccttcttggcggttttggtggctttgatggccttggtcttcgcagcagttgtacgctttgtgccctttgtgccattcttggtcttggcaacctttgagattttcgctgcagccttctttgcatccttctcagccttagctgcagccctctcggcctccttttcagccttcatcttggcgactttcgcggttttgacagcttttgcggccttggaaggcttagccagtagcggctgagcctttggacgagtacccgcagtcgttgatcgtgttgcaaccataatttgagttgggtgatggtcttcaggtttgatttggtttgttagttggagaatgtaaattggtaacgtcgggacgatacctattgtttgttggtgttgttacgataatgatgattgatctgatgacaaaagatttgagtcaagaaaattgtggtcttgttggttaagggaaaatttggatatgttgactctatattaatagaagacagagacgagtcaccattcgtgccaatagacaaagcacgagcagggacgaagaaatctgcagctagttaccagcacaaagaaaaccaaaaatatattttcgagccctcttctttgttgactgcacccagcttgttatcaatacgccgatggccttgacaaagagcgcttcaggtcaatcctgatacgaagttccttttttgcaatcgaaagtaagtttaggtcagattattcagggttgataacagctgtattgcaacacctggacaggattataatttttatcactgttcgttgctgtgttcatttcgacacaaagtttcgagggactgtagaagaccaaaatcagttcgtgaggatggaatcaaaggaagtcaatagaacagaccataaacgtaacccagagaaaccgggcagttcgaaaaagaaaaaaaaagaaagagagaaagaaaccaagagtacttcgagggcgcatgagaaacaatgaacaaggaccgggatcatagcagtatcaaaaacaaaataaacacatcaaagagagcaattctcagaagatcagtcccagaaacaaaacacctcgtttcgggctcataatgggctgatctgatattgctgatcatctcgataaacttgcacccaccatgcttattccagagaggtccggatttttgtatttgaaatccaacgaagtaatatcgacatgtctcccgacaaactgggaaattcggaattgcgaagaggtgggcgagttagggcttgattccaagcggggatacccaaccagccacttccactaggaagcaaagctgaaaggcaagatcgaatctggttcatgtccagatttggcaatggcccgcctcatttcctatggtgaaaatgcctcttaaacaaagcgactcgtatttccccattgctgggcctgacaccagaacgatacaaagagatttgaggatgggtgagtccgtgcaagcatgaaggaaaagcgtaatcagcaacggcggatggaaaaaaattgcgcaggcgtgctagtctgctgtcattgacctatcctgtttcagattatctctgctcgtagccaaaactattattagcgaacgcctatcacgggacaaaggccatctcaaagatcctgtcatatacaccatctgagacaataccctaaatttcggtccctcggatcgtgcaatgtacgaacgagtatgtagaagaaggccgaggagcacgagctagaagtgaatactgctaaaataaaatcataaacagaaagtcctctcatcattcaagtacactaggtatattggcagccccaaagatagtgggatggctgccttgttcggtccttaattatgtcacgatatgggcagactcatcgaaagtaatcccttcaagcgaacttttgcgcaatgaagacccaggcagactgtctattgccagtacctgggttcatcgaaaacatggtagcggtgtccgcgaactccctcgccgcggaacaaggcagggaagcggcggccaacggggaccatctcctctgggatacgcatctcattttcgggttcgggctcgccgatgacgaactttccaacctagatcacgaaacagtcagaaactaagcacgcgtaggagaagaaataaagagagagcatcacttacctggatctccgtatcagtgatggtatcacgactaattctggcgtagccagtgcgatgcagcttcttgaaaagaaggtactcgcaccatctatcccagtcggtagggtcaatatccttcatttggctgcgctcgctcacataggtgttgtagttgccctcgagcggcttggtgacgaggtaacttaataggatcaggggacgtggggaatcacccatcaacttcgacagatactcgctctgcaagcggcggtcctcagggtcttcttcctgtccggagtggaacacaacaatatcaaccatctcgccgtacatgtcgagtgtggcgtggattgcaggtgccagctcacccacaggcgaggggagaaggtggtgcgtagagttgacaatggggaatttagacagcaaggcagagccccaggtgtgcttgtttggaccggggccgaagtcagtgtagtagccaaggtcctcagcgatgaactgagtaacgtccttgttgcccatgatgatacgctgattgtcggattcgaggaaaccaatgacatccagctcaagctcaccgatgacatcgcgcatgcgccgctcagcggaccacatgttgttgtcgaggccgaagtggacagtccagataccagcagtcacaaccttgtcttccttgtgataaggtgtgtagtcattggtcgggaagcggaggtaggcaatagacacggaaagcagttgcagcacagcaagaacgtagatatagtacgatcgctgtctcctgctattggggttgacaggcttgtgaggcttgcgggagcgagtagagttcgaggtcgccgcagagaaaacacccgcaccaatggacagcattgtagtggtcatgagccagtcagtgtgctcacgaaggaatggaccgcctggaacgaaggcataggcgacaacccaaacgtggaagagcaaaagaaccacataaacaaggaagccgatgccgaaagtgctcgcaggagagtgagcaacgctggatacaatcagaaccggggcaacggccatggtatagaacgcaagaatgagggcaccgtagaatccagtccagtggtggtagcaagtaagaagagcagcaccaatggaaccgacaccgtaggcagtccagcttccagcaattctgggatggaaaatgccgtacacaaggccagcccccattgcgaagatcgtcaaagcaccgtgaggagctgcgatcggtccgcgcactgggtatccgtcccagacccatgagatcatggtactggaatcagtcaaaagcgacacaatggtgaacatcagaccgccaaatccaacaccagcaagaatggacgagcccttcttgccacctgctggcaagtaatcaccgccgctcgtgtttgaacctctctgggacctcaaaaccgcgaacaaagcaatgaagattccaattttattccagccaccattctcggcgtgaacaattggccaaagggggttgttggtcttgcatgcaaacttggcaactacagacaaaaccagaccgattccccaagccatgatacgggcctcgagacgaggagcgttgtgccgttcggaaaagaagctggcggtccatgctgcacacgtagtagaaagagcgaatccagtcacaaagaggcggttggcaggatcctggaacttatatccgagaagaccaacgagcgaaaccaggtgaagaaggcggaggttcttcacagctgcatatcgcaaagatgggatgacgtagaacaacggggatgcgcagcaaacaatggcaacctcgtaaccagagatacccatgtgccaaagagggaagtctatcaatatcagacaagtccatatagagaggaatatgtgtcacttacaccagacaaggacaggcagaccagtcacgatggtccagaaaacaaactacagtccattgtcagtaacacaaaagaccaatgatcgaccggtataatttaccccattgtagacatccgcggcggcatcaatgatctcggtccagaagaatccctcgccaaaggtgttgcccaccggctttcccttcctacgtatgtggttaatttccgggatggttgtagttggttatgggattgtacacactctttctccaagacagaatctgcagtcgtttccaattgcctaatgaacacaaacttagacaatgtctttttttttcaaaaccaatatagcctttggcactatacatttgatgcgggcagtgtcattttggaagccacggtacataccctctgctaacacccttaacatccctcaccactagttcgaagcactcaaagtcaagagctgtgacagcatcaaaaccgacatcgaacaggattagggaccattcaaagaaggcatatttggtgtaggctaaaggtttgactgattagcatgcgataaaccccagctgaatgctcacgaagacaagtactcaccaccgggaaccttgtggaccttgtgctgaatgaaatagtaaatcagtggaaccaaagttccaaagaacaaactggccaagattttgcggtacttgacggcgcggcggttgttcgggctgagtgcaaggcaacccagggtccacggcaaggtggccaccaagtacgagatcatgaaaatgtcatgccagtcgtgatcatcggtagatgtaacataggtccaaccaccacatgtcaatgtccggaaaatgcccacgccggcaaccaacttaggtaaggtcgagttcgggcgcgaagtgaggatgtaccacaggaagacaagcgcgaagcgaggaccggaggtaatagcaatgaagacctggaaaaaggaccgctcgggataacggtcaccgatggtcgcagacacggaggggaaccattcaatagggtagccgtagtgttcattctggacgatcttgtggtagtgcaaagcaatgccgacaatcaacgcgctgatgaacgctgcatatgcgaaaaccgtgtgagtccatgcaacccatttgccgttgatctgcaaagatatcaagtcagtggcgtttctagatccgcatcagatggcgcttcagcacttacggcgaccacggcatctccgtccttgtatcggggagccatggcggcacagaggtaaaggcaatctctgcacctatatgattaaaaaaaaaaagctaaaattgagaaagaaaagagcgtcggaaaaagaacgaaaggaagaacggcttcaacaagatgccacgagcgaacggcccctgagagaaatcggatgaaaacaacgcccggatgcctcggtggttctgagcgtcgtttacgctaacccaatgcggctaagcgcaccctggggctgatcggtgttttttcaatgcgggatgccgactatttttttttaacatcttgagtgaacagcaatcatgtccgccgcaacagataaggctcgatttttcctcgagaagtcagtgcctgagctcaaggaatatgagcgcaagaagattttcaccaaggtaagcctgcgaggcggaattcttccattagaataacagctaatgataactaggatgaaatctcctcaatcgttagaaagcgatctgattttgaacacaagctcaacgcgcgcggggcgcagccagtggactttgtgcgctatgctgaatacgaaatgaacctcgatgtgctgcgaaagaagcgggtgaagcgacttggaattcggtcggcagggttcaacggccagcgacgcatcttcttcgttctcgaccgagctacacgcaagttccacggcgatatcaacctctgggtccagtatatcgaatatgctcgcaaacaaaaggcacacaagaagcttctcacgattttcaccgatgctctgcgactacaccctaccagcgccgacttatgggtttatgccgctaagcacgtcctcgatgaccacggagatatgacacaagctcggagttacatgcagcgcggtttacggttctgcaagagcgcgagggcaatttggattcaatatgcaaagctggaactgatttacatcgcaaagctggtcgctcgccaacggattctcggtcttgatgaggagagccagaagcccaaggccatccaagaagcagaaattgacgacactgatgccgacatgattgcgctcccatcactcacagccgaggacatcaacccgagcacaggagtggacggagaagtagaccaggttgcgctgcaaaacctgaactccacgcccgctctgagcggtgctatcccgctcgccatctttgataccgccacgaagcatttcgaccacgatgatcggttcggtcaggagttcttcgacatggcttgggaattcggggatgtgccttgccttcgcaagattttggaacatgtgattgagacgatgcaggccaacaagccttccagcccacggacgcagatttgctacattaagttcccgaccgctggaatcccttccacttcggccgaattcccgcgggcgcttggtacttcgcttgcccgcctcagggagtatcccatgggcaaggatctcgcacaccaagtgatcaactggctccaacccgtccaggcaacaaaggatctggatccttcgttgcagaaggttattgcggttaccatccgcaatgcggagcgcgcggcacaggagtagtatacatatagcatacccaagtattgtacttagcacttaggcgttgatcggatattatcaaaattcagggtccatggcgaacttttccctttactaccatttgcatgatcattatcaatcatcgtatttgcttccccggcgactgcttttcttgtcgctgtgctgtttcttgtctttaatccgaccctcattttgagccctctgcctgtgttttccttttgtcagatgtgctcgatcgcttccatgaaaaaagtgcacgtacaatttttgcacgcgatttctttgctcttgggatgtttccccggggatcacctccttagccgagctctgcaatagctgatagagcttgtcaaagcaggattccacgttgctagactgtttccgctcctcgtccgactggataattagacattgggctctttcggcggcatatcgggaagtgcgtagtggacggtgtatcagacggggaaccaagggcagcaaggcgtccaatgggactttcaaggtggccttggagttgaccctatttccctcatctcccaattagcatcaatccagtactggtattgctgtacaagtggggacactgacttgttcacattttgcccgcccggcccgctggaccgactgaaagagagctcgcagatgttgcgggggatggtcttggaattgagggttttaagccaatccctggctagttgtacatcctgttcggcttgagatgcaaaccttctcaagggtagtgcccgaaggcagggtatacgccattggcaatacatgagagaggcagtccgtggccccggggagaggtggagtgtctacccttggaaaacgaacggctgtttctcgcctggtctagccccgcttagcgctttagcgtacgtaacaaaagcttttattttgactgggatgatgatttagattgattagagtaattggagtagttggagtggttggttggaatggatgatgtagtgatatgtatatgtgatgtagtatagctacattaaagtacatcccattcctatactccatacaaaattcctatggaatatcctccttcttatcagaatctaaatcaattaaaacaagatccattaacttgccctcgtgatactagaatagacatcccaaatacagaagcccaacgcctccggttgctcacctgacctacattttttttccatatttccacttcgcacctgtagaaaccccacctattccctattccttcttcatcgcctattttttctttctttctactcttcccctttcccttctgggtgaggtttgtgaaatacgacccatctttttcccatcgccccaccttagcttgcgattgcgaaaattcctaggaccctcttattcacccatctcgccccgacacttcctctccgtagatgaaaccaccactttctcgaagtctacatgacgcccagtccccccgatgaagcgcttcactttcgcggaaagactctgaccccggaaagccctcgacccctacacatcccagagccatccaatatcccagttttagagaaccaaatggaccccgtcttcaacgatacctccacctatgaacgctcggtgtataaacaggccccgcaaacacacgatggatggttgcacggaggatcaaaagatggtcaggggggaccgagtcagacccaaggtgctggtagttttcatggctcgcagccgaatcgtggggtgcagaatgaaatgattgcttctgcatactattctcctcccaacccagcgtccgggtcggaaaacaccggccatctgggctctggtctttctcctcccgattccacttattcccacactgctccggttgctccggtatcccaaggctttgccactgggagcgaagtagaccctgcccacaaaccggagcagtcaaggatgtcggaccgcctaattgctgaggagcgtgtgggacataaggcgggaggtgtcaatttccagcaactcctcgacaacctttctcgccccaaccctggtgcaactattcccgtcacttcttcggctgggcactcgtctctccaccaagcgcccgctggcgagtccctcaaatcccagggcatccccgcccaccctcaagcccaaagccacgattctgtccaggcccattatatgccaaatggcgaggtggcatatcaccaacttccgtctgcccatgatgctgctgccactgcatcgcctgcctactcagcccaacctagtaatacccaagcccaaacccagcctcagccgattgacacttcttcttctggaggtgcctcggtcaatctacctcctcctattgccactttcccgcaacccccatctacctgtgccgaacctcatggctccttgcaagagccttctgtagcctccaagaaaggccgtgctgaaaagcggtccatcaagcccgctgacgatgattcgccatggggtccagagattcaaaagaaatatgacgagttcctgcacgatgagcggatctatgtgacggaaggtctttgggatcggttccccgtgggctccaggctgtttgttggtcagtattgtttccgcttatgtctactcttcgtcgatctaacattctcatcatgtgcaggaaacctccctaccgaaagagtcaccaagcgagacatgttccatatcttccatgattacggcaaactagctcagatatcgatcaagcaggcgtacggcttcatacagtttctggaggcgagttcttgccatgaggctctcagcaacgaacagggagccgtcgtgcggggcaggaagatacgtgagttactggagccatagctcaacaattcttctctcaaggaaagacctaaccgttctcagatcttgaaatctcaaagcctcagcgatcgacgcggcccgctcaagcatccgaagattcccgtgcaccgccaccacgtcggtcccgatcaccggagttcaaccgtgcccctcctgggcgaactaacgcccgggcccccgtcgatcgatacgaccgatctaagccatatgaaacaaatcgggttccattcagcgatttccgggatgagccctctcaccgcagtcgacgtgacgattatcgcccgccgcgctcaccatcccctcgaccatttcgggggtctagagatgggtatcggtcgcgcgatagaactccagaaagatttgatcgccgcgagcgaaggcgctcccgctctccacgttcttctcgctctccttattccagagatcgacgttaccgcagcatcagcccccggccacgtgggatctatgaaggtgaggcggatttaccggtgcctcgacgagctcagcgagatgtaccagaggtgcagctcctcgtgctggaggaactcgataggttagttgaatcccttgatgtctgtttagacaaagtcgctgacattgcgaagaaacttcgttcttcatgtagagaacgctttccgcaaccgtggattacgagtcgatgtcctggtgcttggtccacggatccctcttggcgccgctgtgcatcgtcagtttattgaaggcgttcttgcggttgtccgcctctctcgtccgaatcaagtctctcgaaagattcctctgcaactatttgatcgaaccgctggattagataacgtccgcttccttggtaagcgcattctgtgttcgcctcttcatcgacgccttgctcatctttctttcccatatagattaccctgagcttgagcctaatatgtctgctgagctcctgagccaccaatcccaagcgatgcagcgaggagcagccccaaccgcatttgcacccaaccctggtttcattatccctccagcacagcccatgtcggttcctcaacctggcttgtctgcgctttcgaatccacccaacattgcgaacctcattagttcactggatggccctagtctttcaactctcttatcggcactccagcgacctccccattcgcaacctgtgtctgctactcagtcgcccttctcctcaccgaacccacctccggccgacctcgccagtctcctgaccaacgcacatcggccccaacccatgcaaactaccgcacagcaaccccttcctcacccacccttcaatctccaacctgtaaatgcacccgtcatcactgatccaaccttactctcgttcttggccaaaggactgggtggacaacagcagcagggccagggacccgtcggtgctcaggtacagaacctgatgcagcacctcgctaaatggaagcaatgatttcacgactctcttattgcctatcattctcattcgaacttaaggttcatcttgtcatcattttcggagcctggcgttcttgcaatccctacttggtggattttagtgctctgcttcggttccttttttttctggctggccgaaaaccagttcttgcagcactaggcgtttcctttgcttttcttttttgctctttgcttttctcatgtgtcacaaatgcagtaagatattaggtagatattagggcaaggcggtacctaggatggagttgatatgtctttttcaatcattggactcttgctcattgtgaatactggtttattcccccccttggacatgatacggatgtttcctgtatacttattttcggttatattattgctggatatctctccatttgacatcaaagcgtgtgctcaggcagaatgagtcaaacttcaatcctccaggtaatcttgtagataagttcacgagttatctacatatagtacgcaagttgagaatcttccgggggctctcaatgcagtctcaacaccaaagccctcccatattcctttatttgttgcggagcagaagacatacaatgcagtctcaacacttctgtttctctcgcgtctccttttacttggctatacagatagatcactgcagaattgtatgcgagctggtcttccgttaccagggaataaaaacccaacatgcaatatatagttacaagtatgtagtctaactcgactgctgccgtaaacagtgatgaaccctcgaccttaaagtatgggttatacggggtataggacggagcaagcaaagcaccccaagcttgcagcttctagcaatgtacctaggtcatcatggtacgtgataagagaggatatgctacatattgtacaaaggttaccgacaaagtccccctggcttcttatttcggattccaacctttctccttcaactccttcaccttagccgcatcctcattttgaatgcgctcgatcgtcttgtcccggttgaactccatcacacgcttttccttgaagtatttcacctagtagacgccaagaatcccgagtcagcaatctgccaatggatagatgtaatgtagagaaagctaggaaacaccaagaatggcagttatgagtagcaaatcaaagatcccatcatacgtacccagctctgtgaacatgccgcctcaaactccgcgacctcgttcgcgcacttctgtcgtgccttcttatcatctttaatagcgtctaggatatcgttcttgtcaaggcaggcgaaaaaatgatcacggccttcccagcagcgtgcgcgactcgttcggtctggggcaatgcggccgccgtcggaggctgcgttcttgtttgaatcaccggaagaccaaggtagccagaccattttggagaaatggttatgtcggagagggagcgggtgagaaattgagctgtcaagttcaaaatagtagagtcttctgtggtttgtagcgagtcaaggtgttggtgacggcagatgcccagatgttggcgggtcaggcctgtgaccgccaagactgttgatcccaagcaggcgatcttcatctccggaccctttctcacttacgcactccacgttctggagcttacatataattttgaggcctctagcactaaatacttatcgtccctggatctcacttggaacaccctcaccgcattgcatgttcccttcccttcgcctccaccgtcttacccgagcctcgagcctcgagcctcaagctcaatccgacctgacacatcgaccttgaaccaagttcgcgagggtgacaagagcccccagtttctatttagttgatgtccgcgcgccgacgtccgccagcggggtcacgcaccgaactccctccgctgaagattgtccgcaagatcctcttgctgcagctcgcttactatgcctgcgccacggtgctcatcctgttcacgacagttgtctatggcgccccattctctctagacctagtctttggctgggactctctgcgcggtgatacgacccttggatggatgttggggttggtgtggatgttgaattgctttattaggtgagttgtccgctgaattccacatcgtgagcagcatttcgatcagcagctaattataatctcctctcggggatgcttagcgtcatgttcctactcgttttcgtatcccgctcaaaattggtcccggatttcgccctgacgatccacttcctccacctcatcgccactactttatacacccactccctcccttcaaacctactctggtgggcgcttcaattcgccagtgcatccatgatgacgttccttggcatgtgggcatgccaaagacgggagctggagcctatcaagtttggtggacataatggcagcgcccaagctggctcgtcgccacaagcatctgccggcgatggtcagcaggagtcgagctttggccgcggccgcggccgagaacgtagcttgcaagaatatgaaatggatgatatgaagcgcacgggtgagcatgctgtatgatttcgcattcgctcgccccctcgccccatcgttgatgttccccgttgggcgatgaacgactttttgttgccctgttatatcattttttttttctccttcttgcgcttcggtctatcgcggactctttgatgcattttttccattctgtatacccttgcggcagttgcatctgtatagatggcgtttgttctgagggaattgatttccatattcttttgttcgatacctgtttacattaatatctgctagctttgtattattcttctcagttggatagtctgacgggctatgcctatgaaaaactcgtgtacaatctctacttctcgaaagcgacattgtcttgaaatgctttgaaccgaatcggaaattgttatatattgctcacaccttacagtagaaaccttccgtttgtctcttcgataagcaaatcatactcaggctggaattcggtatagaagttgtgctaaaaattgtcagcgtacatattctcaggtgctttggcatatatgtctattccacttacgggattctgagcagcatcggcggtgaacttggccgcttcatccttgatgatcttctttggaagaccattggctgctgctgcttccgcaagaagctgtgactgacaagcattctctagcatagagtagaggatcgcggcttcatcaacagttcgaccgacagttaggaggctatacatgagtaaggttagatagaactagacgcatatagaaaatgcaatggcgaaaatcgactcacccatggttttgcaagatacatgcaatgttttccttgcccaaggcccttgcaatcgcctttccttcctctgccgacagaacaatgccgccatggtcttcgtaaacacccactctgccaaagaagttgcatgcgtcttcatccagcttgttagcacaaagccaaacccctaatacgactccaagtgtaaaaggaaaagccaccaaccttgtgtaagcatctcgattggctttccaaatgaactccacgtctttccatgaataccatgcgtgtgcgccgcagccacaacatctggacgtgctttgtggatctccgaatgaatcaggaatccagcttcattaacaggcagctgagctccaccgtcgacgacgaatccatcagcatccagaagaacgagatccgaagccttgatagtcgagaaatgtttggcgaacggattcatccagaaatggtccttgaggattgggtctgcaaggcgtcagaatattcttgctcccataaggtatatttcatttaaacaatgtgtctgtatcaaacctacctcgcatcgaaatgtgcccggagacaccctccccataccctagcttgccaaagtaccggaatgcagcagccatgtgctccttcatccacttgcgcttctcggtcagatctgaaaatgtgggaataccgcggagtttcagagtgccatttcggcctccacgagctaggccctggaacgatgcatcgtttgccgctggtggtagtgggggtagttggtcttcattggtcaagcgaacagactgcacttgctgtgttattgttgtagatgtcgacatgatgaaagattgtcttgatttaccgcactaactcggggactgggccttttaatgacgagagttcgaggtccggtactcgggctaacctccgagctcttatctatgggggaccccgctctgtcgttggaaggcgccggcagcaaattggaacagaggcttgtcaacattgaatgcgtctggattatttcggatttgaaatcaagtaaatattggctctagcggcgtatcatgccattgtgataagattatcagattggtcaaggtttcaaagttggttctctgcctctgaatccccgaatttgccagcattgtcaatatacaccggatttcaggccgcgcgaaatagcttcccctttcccttagtgcgcacccttggtcgctctttactcactgagtatgttgtagagctgagcacgcccctgtgtatcgtagccattaagctcgctgagcatcaccatcacctgatcattatataagccggatacttgcatacgcgactatcacatgacatttactatcctcagccgcaggacagcaaagtccactagacgtttggactcccgttaggactagatagtcgcttatcctccggttcttggtgtaatatagcttcgaagacgacataatcaagataagtgagagctccatgcttgaaccgatagcataggtaaattgttcatttgatgtatttcctttagacgatgcgtagatctacagagagctttaggaaatatgattatatatatatctcgaggcggtgctggcctctgggtgataggaaacaaagtcgatatttctgtttgtctagccttttatccagcctagagacgatattgcctggttttcctcggggcttctgaaccacttgcacgcacaatgaagtcgcagcctctgatggtgaccctctcaccactcttacgccctcgcattgcaacatccagcccattagccattgaaggcaaaccaccactggctggtcccaatgcatattttatctcccattggccatccgtccactcttctcttcgcgcgctcacctcctcgccagtgatttgaacaaccaattctccaagggatgttcgcctaaccatgtggatctgcttctgataaagcaccaaataggagcccccaatttgtgccagaaacgatttggtgacttggtgctggccctcttccaggacaccctcatgagactccaagatccacgaaagaccacgccctggcccatctggccctttgcgaaacggaacatacctccacacctcttcataatccgtcatcaccgctccgggtacatctggtcgagccatggtcccagtctccaaaacatctccattgggtagcgggatgaatggacatgggttgctcacgttgaaattatggtgggagtcaatctcatgggtgaacaccacgcgccctgtgttaagttagtcgtttattgtgtgatgcaccatggccaggaaatccgattgagatcatacgcgggtctttgctttcctgaacacattctcctgcgagggcccagtcgattttgccggttcgtttatcgactcgcagatcgacgtaccattcgccaaccattatcaccagtgtgtcggtggtttcgaagggtgtttctgatgcccatcgcattgagattcgtgtcattagaatcgattccaaagctgggacagatgaacttgacatttttgggatgattgctcaggatgcctactctgaagaacgggcgtgagaaaaattgacaggtcaaggatggtacagggtaatctgcatgattcagttggaaatataaatacttcaaaacaaatatgctaacatgtttccgatcaaagtgtttatcacaatctccaacttccaagaaatccgacgccacgctccccaaagtctcgctggcggttgccgttttcgcggactgagataaatgactcacttagttattcatcgaaggtcgaaaaactattcacacatttagtcattataaagatgataaagaaatccttaataaaaatgtgaaataccatcccgtcctgattctatcgccgcttggcaaagtgaaacgcaatgacttggattctgatcgctgctttcatagtagcctttcttgtctaccaactctcagtttccacttcgtttagccctcttgcacgaattcccggtccaaagactttcgccttaaccaagttcaaattagcctatgaggactacaaaggaactcgcacgcgaaagatcaatgctctccatcaccagtatggacctgtcgttcgtatcggccccagtgaggtgaccttcaacagcacatcggccgtgcgtgcaatctacggcgctggaagtggttttgagcgaactggcttctaccacatgtttgaggtttacggtcgaaagaacatgttctcgttcgcgaccacgaagcagcatggagaaaggaagaagctctttgcccacgcctacgccaaatctgcgatgctcaaaggacagaatgcacaaatggtcgagcagaaagtcaaactgtatatggatctgttggaacgagatggggggaaaagcgagatcttttctaccttgcactatttctccctcgacacaatcaccgagtttctttacggatctttcggcaagactgcatgtcttgagggacagagacaagattgcgcactcattggagacatcatcgatattgcccgccgcaagctatcgtggtatgcagttcacttcccccacttcacggaatggctctactccaggaccggagttactggctgcattgcgaaacggttttacccgatgcagatgccaacgacgtacagcggtatcagacttcacgcgctgaaagccactcagaaatatgccagtgcttctgccagcgcgaaagcgagcacatcggccctgatatccagactgtggagccaccaccattcccaaaaaccaaatggactagatgatcttgatattgcatcggaatgtgccgaccatcttttggcaggcatcgacaccaccagcgacacactgatgtttctgatttgggctctttctcgaccagaaaacagacaattccaagacaaactcattgaggaagtctgcaatattcccgaagactcgctcgattcgaatgccatccccaaggtcgaaaacagcgacaagctttcttacctcgatgcagtcatcaaagagacactacgcctctacgcacctctccccggatcagagccacgctcacttcccacagcaaccataattgatggctacacgattccacctgggacggtggtttctatctccccatacgcgctccatcgtaaccctgacgttttcaaaaatcccatgaaattcaatcccgaccgctggttggatccttgtgcgaacttggcagaaatgaagaaatggttctgggcattctccagcggtggaaggatgtgtattggcatgcagtatgttctttgtttctgtggagtcgacttccagtcgtgaccatgaaagatgactaacgagaagcagtctggcaatggcagaaatgactactttggtcgcagccatataccgaaaatacagaaccacaccgatgggggattttgacactgtctcccctggtatcacaggtcgctatgaggtgttctacgatgatacttgtagtcgaatgcgggtatgtttagctaacatatttctctcgaagactcactaattgtggagacaggaacatgaatgtcagattgaattcacgccacattaagcaatttcgggatatttatgtggtcgtctaagtatgtagttgttgtgccatgtgttttgatttgaatgggctcgcatcatattggggcttcacagattagatgatgattgaaccctaaattttattatttgaaattaaaagaattacatactattttctcacagtttctaatctcaaattcgttttcttctgtgatattgcaactactactactagtactatctcaatatctccacctggccgatcttggcaagaaccccacgatgattgtggaaagagtcagcgagacagcatgtctcattgatcggatttgcaggatttgctgatctgttttatttggtcttaagatagcgctaaatttataaagagcaatggctgcccccaattctactcatgtacaacgttttgaatttgttgaacaatcttcaaaatgcgcttcactacttccacattatctcttcttttgcagggcgctattgctttgaatatcggcccagaatatagtcatccgatagaaggtcagtcacgcaagatgacccaaagatcaacttactaaacagacaatagatctcgacgtcgatcttccattctctcagccagtcacatttgcccacctagaatggcaaagatgtctcgcagcatctcacaataatgtatgcagccaaaacatttgtttaccaataattccacagagacctaaccttcgcaaaagcctcttgacatcgccattcttggcttcccctacgacacctcaacatcatatcgtcccggagcaagatttggtcctcgaggcatccgcgcaggatcggcgcgtgagaagaagggccgaagctataacaccgtgtgggaggtggatccatatgaagagggacttgaaattgtgagtgtagtgcattttaaatcgatgaagtttatgaaatgcaatgtcgggatcgctaatccatcattagattgactgtggtgatatacccatcaccccattcgatgccgcgcacgctttcaaacaaatggagcagggttacagacaggttctttaccacccgacgtccgaggaaaactcatgggaacatcctcggatcgtgagtctgggtggagaccactcgattgtcttgcctatcttgcgatcattgaaacatgtgtatggaccgatctccgttattcacttagattcgcacctcgacacttgggatccttatgagggttacactggaatcgcgtccaaccagtcggcaattacacatggaactttcttctggcatgcgagtcgggagggctgtattgccaaggggacgagtgtgcatggaggtctaagaacgaagctttttgtgagttgtgcgtggctcttgtcgggaatgaatactaatcggaattatcaacagagtcctaaggattacgagatcgaccgaaatgttggatttacgattatcgaggcccatgagattgacgatatcggcatgtccgggatcgttaaaaaggtccggagtgttgtcggggatactccgacttatctttccattgatattgacggtgagattgccctttcctctatctaagacacagcagatactaatcctcaactagtcctcgatccgagcattgcccctgcgaccggaactcctgaatcgggcggatggaccactcgtgaattgaagcgattcattaaaggccttgaaggtgtgaatctcgttggtgccgatgtggtggaagtcagcccaccatatgacaccgttgctgagactacttctattgctgctgcggatttgatcgttgatattctggcttccatgtcgaagttgaagacaggtcctaaggtgaaggcgccaagttcaagagatgagctgtgagcagagcttgacatatgtttcaaactttgagatttcaaccatgtatgaatcacgctatatgagactttgctttcagataggcaagaccaacttgcccgattgtttgagcgcatctctccagttaagcacattctcatctaaatccatgatgttccagatttcctgtatgactttccattgccttttgaaattgcccattgagtacctctgaactcgctcccaccattcaacccaaggttgtcgatcgatcgcctcgcatgcagcgataaatgctggccaagacataggagctgcgcgttttccgtcacttgagtatacatctttaaggtcttctgccagcgaaaggttcttccaaattgcccctacttgctgctgaagatccaccgggctggagtcttcaattgctcgataataaaaaattgcgatcgcgctgtgaaatgatagagcctggcaacgtattatctcaagcatcgtcggctgctctagcatgacgtgatggaaagactcggagtctatatcccacgaaaagatttcatcttttaatgccgagcatgcctccagcaagattgttggcacttcagcaccctggtagaaggctaaatactcggccacctgacaggtcctttgtagaagattccccagatatggggtaatcccatacatgtattggatgttggtgtcgtcgtcgtggaagtaaggctgctcaaataatggaccttctgttgtccattgtctatgctctagctcgtgtgctgtcgttcgagccaggaggcttaggaaatggcaaatactgctaacctgccgactggagtcattgggtgaatcggacgcacggcctggtctttccagctgacgacaacccttgagatgaattggaaaatctgaatcttctcccgtcattgtctgatttgttagatttaataagcttttttataacgtggagcgaaagctacctacatcgattgtgaccaaggccagcattgccgtgagatagactgtatatttctcagagtcattgggcgttatgagggcagtcttgagtgcttgtaaagctttggcccgatgctggagaccaagtttgtggtattctcgtgaaccacccatgatgttccggaggtggaatgcagccgatgataatatactgtggaatagtgaaatcgagacttccgaggaaggcaccggattttggacgagacagaactcagggcagccctcgagggcgaatgggagatatgttgtgcgccaagggttcctcggatggaaaactggttgtaggagctccgcgacatgatttttgtagtgatacataagcattgacgtattgtgatctttgaacagaggtattgaaagctccatgtctggtgatggatatattgtgagtgacatttttctcgagtatggtaatgttggagaattcgatgtatccatcatggctatcactgactcccagtctgaggggaaatctatgaaatggatttctgaattaggaatgacattgtcattcgtaattatttcaaaatctccgctggacaagtcaactgtgtccactggactaggagcgatctcagaagtacagtcctgagtctgatgactgttctccaaagaagcgtgaggttcgagatattcaatgccgggttcccggctggagaatattgaaaagggccctatactgactgtgcgcgatggtgttgagattgtgtcaagagaggatatcattcggttgatctcggcatccgaaatgctaggggaagtggattgttcttaattatgatatctatcagtgaatgtgcctttgaaacaaggccaagaagagggtcggaactcacctagtctgacctgcctgcgtcgtaggccttgaatatctcgcttcttatctgtaatccagcacagattcacaccgtagccggcgcattccaggcgggatttctggcaaactcgacacccattttcttgacgctcatcacatttgaccttccgagacctgcaggtccagcatctgttcatgtcagcttgaaaggtacgtggaagttcgaatatagttgaaacttgatgtattaccctgtgaatgtcaccgatttctgctttgcttggcgaatacgtttggtttgttttctaggagctgtcacggggccacccattgtatcggtctgactgtcaatatgagcaatgggagtcacctttcgatggtcgtaagggtatcagagagacccgcgttatggcacaacgtgcagttggatggtcaagaccacgcagttctcgatagtggagctagcttgagatacggggtcagtgaggaccaataattgcaggtaatagccgatgatgtgccccttgtgcaaagatatctgctctggaccccaagactgtggggttcaaatatcttgattccatgacataacatattttggggatgaactccgccttatcaggttggcaagccgaggtcttatcaattctttatcagtgtcttatcttatcaccctatcttggataggccttttgaaaagggaaggagccagcgagagcaagtaatcttagaccagttggacatgtagaatggacgtatttttagccacaccaggataatggcttttgcggcctctgccattagttgggttgatagtagttctttagatgtttctttttatagatatcttctcccttcttacggtggaagaaggcaagaaaaggcttaatttggtagacaacatttctatgtataatcttcgattgatatcattggctcaacccattgacagactggcacggaatgcttcagcctatctcagtgcaactccacctgcggtcctgtatagttcccttttccgtgcaatatccaccacagcgccactaacaacgtcaatccacatgtgatcacactggtatagttcatatcttccggggatgttggcagggtataagggaagcagtaaatcacaaaagagacagcaatgtacatgcatgcgacagaattgacaacagggccaattttccccatccaaaatggaccagggcggatgttcttgcgtccagttatcaaatgtggaaatatcgcgaggaagtatgagactgtcgtcagcagcacaaacgaaccgataaaggccgagaaggcagtataggatcccacataaattgctccgatacatgtcagaaacactccgcatgccaaagttgcatacagtgggctatgccatttcgggcttatagccccgatatgtttggaaaatggcgtcgcgttatcgcgacccaggacatagaatgtccttcctgcggtaatatagcatccaatcgttgcaatgaagatgggtacgatcgtgagtgtaagaagccccactgcacctgctcgggaaccggttgcttgcaaatagatatcaccgagaggagagatagaatcggcgttcacaatgagggataggtcggtgacagcatagaatatggaaatcagatagcaaagaccagttgcgaagccgatggtcacttggcaagcaagtgctttggggatattccgtctcgcactagtcgaagtgtcagcgaaagaagcattaccatagaccgatattgcctactcaggaatctcttctgcaatgtgagtgacgcagtcaatggcgccgattgcaaatgccccgttcaacatgcctgcaaggaatgtgaatccgtcagagtaaccagtaatgttgttccagtctgtccagacgaattcattcgatgcatatcctgctccatccctgcttggcataatagcacaaactaagactgagatgacaaaaccgacaataatgaagaacgatccgatcctgctgatgaccgcgagagcccgttggcagaacatcacagtaagacaacatagccaggtgatgatcaaatagcaaacaaaaacatgccagcgctgcggttttacctctggatggtagagcgtgtatgaatagacaatcatgcttcctgtcatggaacagttccctgctacggcgaatgtccatgcgaggccattcaaccaccctgcaaaccagccgcacaacctgccataacgaggaccagcggttattgtagcccagtgataaacgcccccagatgccggagtagcagaagcgagctcggcaattgatgcggcaatgaagcaatagaaaaaggaggcagtggcgctatccttcgtgtaagcatcctaggaaaaacttccgtaaacgtgtggggacctacaactcgtatattactccaggtggtccaccattgtagagtgaggcaatctaagatgttttagtagtgcacaatttggagagagtatctggtgcttacaattccgcctcccaggaccgcccaagcattcccggtagtgattccagttgcgcaagcactcaggagattaaagctcttcgcaagtacaggcgtgacctgagtctcagtaacctcttttgtcgatccttggagggaagactcgagatcgccagggttttctttggtttcaaactgtgccatggcagtagacatgaattgcaacgcagtatgtaagattgtatatcactcacatctttcgatggaaattgctttggatatttatggcttttctttatctttacagttcccttagtccattacaagaaaggcttcgtcccttcaagatatgtgagaacaggtcgctggctcttacttgaaaaccaagatgcgattgaacccgacgatagtattggctaagagatacttttatcttttgtctcttttagatatattatatcgtatgtcgaatcaacctacggagtacaagctaatttctcttcgctagctcttgccatacgaattcatttctgataagacctatgatttcacagtactgcgtagtggcaacaagctgttatcgagaaaaatttcctatcactatcgcgacccccgtgttgagtggtaacgcatacccattctactcgctggctgttgccggatctggatatgctcgcgggcctgatatttccccaccggaccgacctattatacattatgactgcccggtgaagttcatatattccgacttcacaaatataaagcacgatccatccctcttacccttgggctcctatctaaaaaatctcagacttgcaatattccacaaacatggctcactccctgagtaaccaatctatcatcataacaggggcctctgcaccatttgcagaggcttttcgtgcctgctatggcggtaagtttaattagaaatagagaattatatatcagctaacatctatcaaggtaccaagaacaagactatcgcggtcaacctagatcatctaatatctagcaatttgaccgaagctcaggctcaggtaaacaccgctttcagcgctcttggggaccgaatggaggttcttatcatcgatgccagaacgcagcagccatatgggctagactcgatttgggagattccgttgagtgaatgggatcagggacacacatccatgagctgtcggaggaaaatgctggtgcaggcaaagttgttccttcagcaccaattccaggtcagcaagttgaaggcccatgagaatgaaccagggagcggtttttctgttgtggtcctcggttatcaagatctcttcggtgtttcactcgatcaagttatttctaaactccagagagacgtctcacgacttcacccgggtgcttctttcaacttccttgatcttagcacctcaagagaggcctctgtcgcgtccatcgtcgcggcaacagcgacactggtctcagcgaaacccacctgtggaataatctcgctcagcgacattgcgagtgtaaaccccactgaaaagagcaaaagcgacaatttcgttgctgagaatacccagctttgccaaagtctccccttccatcataagcacccaaaggtcaaagttgctttgtcgtttgactttgacgcagtctctgccttcctggggacaggacaccatccagacaacaacttggcagactacagcacaggcatattcgccggtcgagtgggtgccaatcggctactgcgcatgttacaaaaacaccaagtagccgacaaagtcacttggttcatccccgggcacacgatggaaacctttgaagcaactgtcaaggagattgttaagtccggtgccgagataggacttcatggttattcccatgaaggtgcctaccaaatgacaccaagtcaagagcgagatgtgctagtgaagtgcatggaattggcccagcggctaaccggcaaaagagtgcaaggctatcgcgcgcccatgtaccagctgcgcgaaacaacaatcgagcttctgagggagtttgaatttctatatgactcctccctgagtcaccatgactcacagccatattttacacccagcgatccgccaattaaaccggtggatttctcccagccggccagtacgtggttgcgccccacgccgctttctgagacgaatgcccgccccgtcggccacccacttgtggaaattccgaccggctggaataatgaagatatgatggcgttacagtacttcccgcatctcgacaataccaatgggcaggttgatgcacgggtggttgagcagagatggaaggacatgtttctgtggctgtgggagaatgcagacgttgatgggggcgatggaagctttgtcttccctatcttgatgcatcccgataccagtggcatgtcccatgtgatagggatggttgatcgttttgtagggtggctccggggatggggggacgcagttcagttttgcacttttgagagtatcacacggcagtggttggaagagcagcaaaaggccaaatgaaaccgtaggatattgatttatagaaaatgaatatgtttgtttgtctaggtgattagaggaggaatcagattactccgtatatctgtctttgatcgaggtatattggattcagttactgggtagatcattatatatctatagctgctttcacaccctagagactcctgggataagcaattataatctaagttcccaatatgtaagattgctctaactatatcgaacgaaggctagctctacgtctgttttaaaagagcttctacccttgagaatgtttattaggtataggttctcgcagaaaactctacattggcggaatctcatggcgaatctttaaatcacatcctttttgatacccagttagctcgtttggttcttcaagaaaacatcccttgtgtgctagcatatagcctccccaatttataagatctttcccgagcctatagtctgtcggtcttaatcttgactggacaaccgacgagggactggtaaatctttggactattacttcatagttgacaaaagacttatcagtcactactatggccttatgatcttcttgccaacattattcgagaaactcatggttctcaatcctcgacgtagatacttgccaggcccctatttagtcctttgacacgccattattcattgtcactggcaacttgtttccttccagactcgacccattcttgccaatggtctctaaaacctttcctgatcggtgaacgaggggtgcgcttcagcaaaacccacgggaaagagcctccgtgtgttgtcttgaagaaggagcccttgggataaaagcagtagcttccacctaagaatttcctcttgtcaacaatacacctctactgctcgcatcatttgtgctgccgctttcttctgcttcttctttttttttgataaagaaaacaagatctccccaatggcagatgcccagccgccgcggaagccctgtgttagtgttgatcaccactgccatacctttctttcctgcatccctcccaatcctcaatgcaatgatacttctaccatgaccatcatattccatatatagactgtcgggatacgtactaatatatgacagggcttctgccacttttgcaacttccctgggcacacagaggagaattgcaaccgcctgagggcattggggtcactgaacagaatgtccctcttcccactccccgtaagacctatatacctgcttctggggaagtttatattgattcaagatgtgattgctacagaaaaagcgcaagtcgcaccgcatctttcgaggcgggaaggccaagaagggcatgtcatgttgtttccatgatatcttacccaaaattaactctcacctcactctcacttaatctctcgcttcatctcatctatttctcgctccattcttctttatgttgctgtctttcactgcttcattgctccgttgccctgttgctccgttgttccgtttctccgttgctgttgtgccgcacagaggaatggctaacgtatgaacagccaagactgctgcagagggtacgtgttcccaaacaattctacggaataagccaacaaaatgctgacgtaccttgtgtgtttagcagccgcctccaaagcagcgctccttcggcagccaccacaaccatcggtaagccaaatgccgctatactcgtgttttaccgtagaactaagtcctgtcttgatgtattgaagtgtgttgctactcttcgtttgttgctactctgcgtcgtgttgctgttttgattcctatttatttttcttgctacgccgaactgtcactgttatcgagtggttgtgctaacagttaattagtggccaccccctccaacaaggaggagaagaaacaggagtgagaagtcttgccggtcctttttggtttttagtttttcctttttgttacctgtctctgtttcttatgagtccgggctgtggcttaaatgcaatcaagaccggcgtgaccacttttaaccactcatctgccgtagagagtaaaaacacgtctcaaattcatgctcccatatcattggctttgatctgagctatcataaatttccatatgcctgcttaaaagcacgttatgcccaatttcgaactttctgaacaactttctttctgctaagccaggtatttcactctcttattctggattctgaccctatacactctacctatgtggctcagcctagttgagttgccgatatagtccgtgaactctaaatatacatagctagcaaccttaaaaatcccgtgggcttcgtctggatgttagctaatcagccaacttcacctgggcacctccaggctaggtaatcttagaagctctagagagggactaaggacctcaattttgaagcgtaactaggagaattcatcaactgtagggtagtggttcggatccatgattacacatgtacacgtatgcatacataggtaaaccttgggagaacgttcgcatgacacctacaccgtccaccattttctctttccacattttcctcatttttactccttcaaaacacctcaatatggccgagacacaagatcagcctcgtgcgttttcttgttcaacaagccagagatcttgagcctgacttgctttctcttgaagacttccagaggcttggagttcaagcattccaagtatccctggccccggaacatggcgaaggtctccaatttgacccgtgcttctttcgaccacaccccgacaaactgtgtgagaaatatccaatctacatttaccacttggaagatgatccacgggatatacaattcaccaccttaaatgattacatacaggatgccctaactgagcattcccctgaatatgctccgataattgcgagaatggaatacgaggaggattctgatgttccaccagagcgtgatccatacatgcatgcccaggatgtagaggaggccattgagtctcacatcaaggctggaagatccggaccgcatgaatgtttctcacttgtaaacttcagaaagaaagatcaagaacgttggaagtaagtagacagtcaaatattggattatagcatgggactaacaattcctagcccaaaccaaagagaagaccaccctcgtgtctacgagggatttgaagatccaaaaccgtggcgtgtggtcaatcattaccgatacatcagtcgtcctcttaagccgcattcaattatgtcgtgtctcgctcaaatttggcctgatggaaatcagagcctcactacccacgagttgagagccatcgttaacatgatgcttcttcgagtgaatcacaaatcgtttcgcagatgccatacccacccagtaggtgatttcccatgttttacatgataatgtctaagaccaatatagattttggttctctcttatatgggtggtcatcacggcagaatcattcaggcttcgtatgatggaaagggactgattctacaatatcctcaactatggagctttgcggatatcaaaacgacaccggtggaattgttcgttcgataccgtttaagcgagccagttggtgctattcgcacgttgtcccttgaatagctacatgtttaaatccctttattatgatagagcagttcatgaagcagttgctgaagtagtgtttggagcagttcttggagcagttgttgacgtgataaaagtgacttaattttgttagtggtttatatacaaattgtaggtatctaccgtcttgctagagagtaagctgaatcccggtgtgacagagtctagcgacgtaatctttgacacccgaataatataagtgttcgatatcttcaaaataatagatgctactacaaatacttatcgatatctatcaatcaatagtggaaattagattaagttgttgtggttgaaatataaaattgtactctatcgcataggtagctccctcggttgtggtggtggttccggggaatgtatcaggtgactaatcaatgtcacctgatccgttatcggccatgtgggcttcctatctccaggccaatatccctctctcctccaatgaccaagtcgtctgatgtcaaaacattgagagccgcattgaagacatattaattccaaactctacattcccctgactggctggattaaaagatcttctcaagttacttcattgctcttctcttctatgcagccccattgagatagacattggacttgtctagacccatcatggtggaaggagatccgtcatacatagactatgaggccttcttagacccagacttctccccatcttcattcgccaatacattggtgacaagcacaaacaatgcaacagataccccgttggatttatcaacaccattgtcacgggtgctcttcgatcttcaggagatcgacacacacatccatgcattgacaaccagatcagcactaccattgctttcacacacccaaagccaaacggctgccgctgataatatcttgaaagaatctgggacgcagattgcttctgtgactcaagggtacgagcgcctccaaaaggaggttgtacaaaaatgggaagcagctgacaaagctcgtgttgctgctgaaaactcgcttgaaactgttcgcctagcaagggcagtagcgcgctgcttaactctgggtagacagctggagagccaggtttctgaaattacaggccgagggccgaccccatcatcaggaccggatggagcaacatcacctggaaaagatggcttccgcgcactggagcgagcagcgtacacaattctgaatctgcgcgaaatgttctcagccacgacacagggcgatgaaggctatggtttagatcgggtgaaagccattcgcactctacgtggagaatttgtaattcccgcggagaacatggtcaagtcaagagcacaacagaccatcagtcgattttctttgtcttccaactcggcaagcgccaatagccagtcatcaatgccatctggctataagcaagctcgtgatgcccgagcacgactggccaccgctgccataactctatatcttctttcgcctctaccaaaaggcgcaagcactgcagccgactacaagccagaactcttattgtcaacattacaagggttcatgcacacagcgatcatgacatccgtgaatgccctcgcccgggctctcacccagctcccaatcatgaaccaaacacttgccgacacctctgcacgatgccaagatatagttgccttggagagcattctcaaaaacatccgcccaccaccacaccctctcttggcgtccactgccacatccgacgaaccagctcccgagtcccaaacagcggcctcgaacaaatataatctcctgcagcctcttctccaggctctggacaccacatcacttccttcctactactggcgctccctcgcctcttctctcgcgccacgtgtccaggacatcgtcaaccgaggcggtgtttcttcccgtacattacgatccaaccgtgaccgactaagagtcgagatcaaagagtgtgtgctccgtgcgtcgcaggtgtctgctaccagcctgctggccgagaagggtcgaccaggaaccgacacggtagtggttggaaattgggagcgagaagctgccgtgatggtgagctccattgttggttctctgggacggtaatatgtggctactgcaagcatggtgtacatgttaccgactcaagattcggtaccagatagatgatgtcaatcgcatggattgactacagctttaatgagaaatatagttgtatggcattatctatctaaagtgggatattacacccgaatctgttgtgctctgatatttagatgtgaactagagatccggggttgattcttccgtctcatagaatgagaacagtcggcgaggatttggaataccacataaagcacttagtcactcgacaagagaaactagaggtcttgaacatgataggtatcagggccagcgatggtttctgaatatggaacacgttctgcagccattcttctgggaggacattgagactagcacaagtgctaatggctcttggtatatcgatgagtcgtctctgtgctttctaacatgaaggagagtcatcagtaggctcttcatgttcgtcgacgacgatgtacatgatatcagtgtggatttgaagaattgtcttgctactgttggtcattataggaaggtcggcgatgaatgacgtaacgataataagaaaatacaaactaatagccaagctaagggaggcgttcgtaccttcccagagggacaggacgttccacggaaccgatcgcgtggcgacggataacaattgcatggtatgttttcggtgtttcggcgtatcctcggcatccatgtcgccgtgctcttgccagacaacaattgtcgttgtgtgggtcaatgttgccacgggtgcggattgtcttttgaagatcttccgggtcctctacagtacgtcccgaaactggtgcaaccactatactcttcgattgacttccctgccccttatgccaagatgcactagtctacatttggagttcttctggtagttgcgtgtgtatttcaccgtacgtatgttacatagtaatttcgggcatgtatttgattgaaatttcaatatatccgatacctctatgcccctcctccgaggcagctttccttgggaggcgcacttaacaatctatcacaagtggtctaaccaaatatagctcaaaccctagccccttccgagcatgagcttatctatgatatgattcacagtggcgaactatctataactaagatggcacaggccgctagttataataagagtactatctcgagaatctcttctaatataagaatgtttagtagcgttaaggtacctctaaataaggaccgtgcattgatcttatatggtacgaaaacgaatccaggattccccaaaaggttgttttcaagttcaacgccttaaacaagcctttaagaatgcaaatggcctaggatgaactcaacattctcaagagtctaccgccacatcctaatataataccattcgatcgcgttgttcttaaagaccaggagtcccgggtgattgggttcacaacgaagtacatccctggaggaactctcgccaattcaaagatcccttttcgattcgagtggctacaacagcttactcaagtcgtggattttctcaacctagaactagggatcatgcaccaagatatcgctccccgaaatctgctgatcgatccttgcacacataagatcgtcctcttcgacttcgaccgggctgcatccgggaaaaaacggctatacgaaggtcgagatgatgttactagtgtcgtcttcacactctacgagcttgtcacgaacgatacatccttctcgggtatcatccactcgggtatcatccactcggatcgacatataggcatggtgcaaagtatctcggaatggattgttaatcgcgaacttgactctgacgtatcgaggtttcgtaacttcttgagcgaatgggtagcaacacgaagatctgacggggatatggaaaggtatctcaatgcaccacaccgatttacatggccggacctaccaacagcgcccgactacaatgtaccattcgagatgggcacaacctgggatggaaagccaaactagatgactggccatcggtctagattcaccgcaatgaagatggggcagtactgctttcgctgggagaggccaccacagagccgctcgttgatcgaggctgagaatagtgtatagtggatcagaatactagactgcgaaatgaaggaatccatatttataatactttcaaatgattggtgtactcctgatgcatgttgagtagtccaaataacacaggattacctttattccgaggctagtctatatacaacctaatacgtctggcattaggggtagaaaacgaatataagagtaacaggtgctaaaaataatttccggacgccgctatcagctggtctttccttttgtctattcagcacgcatgagagcattttaacggtagcatcacgggtgaaaataaacagcctgccaggcgggattaagggagatctggattcgccatagaattgtatattctcgcacatgtcagtgaccgatggctcacttggttattttaaccgattgtaagatggtggggctctttcttctgttagacagcatcacgctttctattttcgggaatttgcgccattctgcagcgtctcaggctatggatgctgctacagtggatagcgagaacatcttcctccccaacgactgtctttctgttctcggggcccacccactcccaaggccttagcgtgaatcctctaactagacctcactaagtcgagggccactataaaatactctttacctagtctatggccatcaatttttaccgcccaacattcaaagaacggcatataatataacagggagagatataataccatacacaattcattatacagcggcccctaacttagtatggcctaatgagagatcgacgctaaagccttacccaagaacagaaaggcagttattaggaaggaagcagatttcgctagtaactataggctgttctctaatcaaagcacataatatatctagactagataaatattttcgttgccagtcacttccttacgtcgatttaccctaaggccgatgtcacgaacgaaccgccgggcggcacctactttcacactgtgcttaataaagaaacctgggtcttgatccttataaatctgcataaggtcaagacaattttcgaggatcacatcgtgtgctttgttaatgttctccctgaaagtctcgttgctcacccgcgattgctgccattcagtatattcgtctacagcgacatccagcaggccgtcaaccatgattgattcagtacagccgggcccggtgagtatggcgtcattagtaggagggtgtatcgattgctgagatgatcctgctgggaggatagtgatattgattggaggacacatggaacccattgtagagttctccgcagctttctttttcttatccagtcgctggttctcctcggcatagagctgctcgcgaacactgtcagggacaccagcgtaggtctcaagaaccccaccttgctccacatatttgacgagggccttcagatggtgtgtcttcaatctatagtgcctttttccctctggatcttgccagcagtattgtccttcgtggcgacatggcggcccgggacatcgcatgacacgatacacatcgcgccagagcgggagggaagtgacaggtcgccagattgtcgaggcactcctcagctctattgtttgccttttggcatttccatggaaaattctagttcccttggatcgccaatacagttacgagacgaggcaccgtattttaataatagtaaatcacggtatcgagactggtacaggaatattgatattcctgggctattcccattacgttctagtgtctcttggcggtggggctagagaatcacctgaagagtgtaggcggttgcaccagtttcgggacgtactgtacgcaaatgatgattcgactttgactttagcatattggccgatccctgcgttacagttgccacttataaggtgttcaccacagtagttgccccatgcctttgagaggtgttttggtgcctaggggcacatctaggatgtgtcagaagagactgatgtacaggaggtggtaagctttggggaaatggaaaggagtgaagatagtgtgatgaggggaaggataaaaatggggatgtaggagaatatattgtaggaaaagagtgagtctgagccgaagatcagaagagaaagagaaaggaacataattggggaaaaggcggaagaccccattctcctgtcattgcgtagatatggatatgcttatttgagcctcaaacgtttgaatgtgaacggtcttcggaaacaaactaatagaagctctcactatacacttgactccacgtaaacaaagcatcaatgccacattttcagactttacttttccactggcaatagttgctacataacgatcatctccttctatactcaatcctagaatgatgccagctctctcgtgtcttaactattagattctaccataactgtaaatacctgaacgttgacgtcgcaccatgggcgacagacccttggaagtaacaagcacctcggcacataagagcaaccaaccaggcgcgaagccaagacgcgaacaattagcgtacctgactaggagcaaaaaaaccgctaggtacattcggacaaccatcttagtaccaggttattgggaccagatcgtcagatcgtcagatcgtcagctcgtacagaacccaaagcaaaaacctccgagcatcggaaataatccccatacaatgtacatatgtactctgtatatacacattaaatatgatttgccgcagataagcgagtaatatacatctgcaagtgcgttgtacaagtacccgagcgctggatgttctagagtcagatgactcccacgcagtgtaccactaggcagttctgaaatggctgaaagctggtaactatgtgtactgcatgttgactcaatgccctagatgcagaggggacagatgcatgtcagttgctaggaggtgagggtggttggtccaattagcttgtgggaatggcatgggtatggattaaagaggtaagtgcgctttgtccgtcccgtccggtctgaaattcacatgtgagttgaactttcagcctcctgttagtacttattgtatgtactatgtgtgtattgattgatgtctaggggtggtaaggttgattgatgttttagatgatatgttagtatctatcttactactccgcagatgctgctatcatatgagacgagactatattatagtaatatttttttaatccatataaggcggctcctacgtggcccccaggtacgcatcccgataagatcaggtacagtttacatggatggacctggtatgggatgcatggcctgtgattggactgattagtaaatgatcgatgaccagtcagattagacggctggaaaggcaaacggatcaccccaggggcaataaaacaggtggcagcatgcggagtccaaagtactgccacataataaaatcccgatctctggaaggcgtggaagatgtggaagtttcagccgtagccctggagatctcacaagtcaaagacgtcagcatatgtatccactgacccggatgggccccggcactataatcaggtttatcgataagccctgcggcttggtacctggctctacttggccgtgcgcctccctgccaaccctgcagatgtacctacaggtacccgggtctaggatttccccctcttctcgtacatccctaggtaggctatttgtagcgacgatctatccatgcgttctgagaccccggtatatccataggggcagacaccatatgtgcgttgcatgttttatttctccgtacttcacatgggacttttcccgtggctttcccgtgggagataacgtcaactaaactgtcgatcatttagactagcggcaggagccccatcctcacctatttcacttatagcacctgctgacatccccgaatcatattccacaaactataatacgtaatgtaccgtccttgctcaagggaaccatgtctctagggaagaggagtgtatatcgcctcttttccacccgccaatcgtgttcgctggatcataaccgaacttccatggggccgatctggggccaatgcggtaccgtacatgagtcagaacttttagatctacaatacgaagtatacccaagggaataagcacatcatccagatcggccgtggcatcagatctcgatctatttcccaggatatttgatcccaaggctaaataaagccaggcgaatagagtacattaaggtacatgagaaccaaggaatcaaggatctaaggatgttgtacaacattaacttccaagcctgggaattgccgtttgcagactcgagggaagtggggggaaagtttagtagcgacgcaggcacgatgggccaacgggcttagtcccagggggtgaaagtttcagatggggagttgcctgaatgcggtttcaacggagctgccggatcccccaggtgacgagctcttttttattattattttggtcttggttctagggcatttccggagaaataagtacatatcgaaagcgggatgttctagaatgtatagaatgtatagaatgcatattatagaatgtgtacaatatggaaatgagatctatctcttatcaacaccccccgcagtctacatgtataaatctaaaattatcatgggctcggaccaatgtgagatcctccatagaagggctcgagcaaaggatactgtatgaaaacttcgtatcgggaccattcggaactctttcccctaccgcgtaaccatctttctggtaagagtatgacgaggtgcgatacatccacgcgatgtaagggggattggggtggtggatgtggttgagaggaggggaatggggagtatatcgaggttaaccctaaaaactccaccaagagtctcgacctttttttttctccccaagaaccaaacttgtcgatgcttggcagtgtctatttccagggtctggaaaagatggttaacgtcaaggaccagtcctcgagggtttaacgtccctctataatagactcctatatcgaccgggggggggcaggattaggtctagacttggatctccaggtcaatcgagtccacgtagctccaggtagctccagatccaagtagtccaagtccctaatgaatcatggaggtgcctggtgccttttggataaaatggagacacgcggatatctggtgaaacacctaatgattcgcatcggtagccccggaaggtctttgagttcctgttcgagttcctgtctctttgctctctgctcttttctttttttgcccctcgcttcctgataagcctcttcttctctcatcgtcaccattttttgttttcttttctataacctccctcgatagtatatatatcctgcatatatactgcaccttggtctttttctctcttctttttcttttacccggctggtcggttctctttttcgtttttctttttttctctcttggaaatatttcagagatgatcgcgatcagctaataaccttcccttttctcttatttcttacattcttgaccttctccccgcccttgcgtttgggatcctagtacacattctatttccgcccctctttctcttctttctctctcagagtaagcgcactttcaaatcgtacgtgttggaactgatccgagtctcttcgggtctctcgtttttttccctctctttttttgtccactcgagtagtgtccaggttactgagtttgcgcaaatgttcacagtcaatccggccagactccgcgtcttgattcaccccgacttctccgtagcgctgcggtttttccgactcggtatagtgacatatagaacttcaactggttttggggtgattattccgatcggattgtcggctttgcgatcactggtggtcaggaacattcgcagttggctctccgaagacctgacatcactcccgcctcccaccctcttacgtcgctatggcttcctttctccctgtcaacaactcggcccctgaagaccacgcgatggacggagcagctacacctcgtgcgatctcaaatagcgtgccggtcacaccggacgtttcttcgacggagcagttcccggacggagtttcacaccgcagccgcggtagcgacacttcatcccgcacaaccttaacccacgctcgaacaccgtcaacgtctgacgaaccaatgcacgattccgagggagaacaggacgattccgatcatgatcaaaatccggggagtaacggacccccctcgaaaaagaagaaaggacaacggtttttctgcacctctttccctccttgcaatctgagcttcacccggagcgaacatttggcccgccatattcgaaaacacaccggtgaacgtcccttccagtgccactgctctcggcggttttcccgactcgacaacctccgccagcacgctcaaacggtccatgtcaatgaggaaatccccggagattcgctagcggccacgggcacacggttccagcgtcaggtccggacagatcgagtgcggccaccaggccgggcgcgggcaggcacagcgggcagtattggtggtcatacccggggtcatagcaggaacttgtcaagttcgagtattgcatccaccgcttcgacattcagccaacctccggaacttcggcggcgcccccctcctttgatcatggccaacgaccccgcagctcgatcccgactggcgatggattcgatgggagaacctccgagcacacccccaggccaaatccgtggcgttcctggtccctcgacagctggatcaccgtacaccccctccaatatgtttgctgttactgggggaagtccccaatttgcgtcgcccatgtctggcacagcccatgggttctgggaaggcaagacggccgcccgtcgtctttcagtcccaacgagtagcaaccctttccttggacagcatggcaatgcgtatcccccggcataccacacccccgccggcgccccttatccgaacgccgctggcgtatttgcaagtcctactagcacgcattactctgcatctcgtgatgagggcaccttgagcgcggctgaggcggagatgcggagaagaacgtggcacccttcttcctacacagggtttccacgccctgcgactagtggcctgaaccaataccatacgcccgacaatgtcccggcctcgttcggcgtgaacggttcgaacgagcatccgccccgactccccggaattgaaagtttcgacaaagtagttcaacggccgataacccctcccactcggaaaaccagcccaatgcagctggatggccaccatcgtccacctaatcacggttttggatctggattcaattacacacagccagcccaccgtccaccgccccccatctccggccccggtcaccgacgaggccatgtatcctgggatatgtctttgcatcataacttaaccggactggatatccgagaccgacgtccatccactgcctccgctactcaatggagtcaacagacgctcgcggaactccaaaatgtctcttcccggccatcgtcatcttaccagcctgcattcggcccaatggctgagagaagccctgaagagtatcggggacatcgcccaagcctttcaactgggagccgcacgcgaacttcccccgaggattccagtagcagtgagggtgtccataccccatccaccgcatcgcttgaatatcatcccgcgattgtgcacagcagcggatatatcgaatctcatgattcctcgctgccttccgatcaccctccaccggtaggaactccttttcgagcggacggctatcgccccggttactaacgccgacatagatatgtggccgccagtcctcccacgcggacggctacgaatcccataacgaccgggagcctaggcccgacgtcttctcggactctcctgcccgacactcgggcatgggtcgcctagaggctcttgtggccgttgccacaagtgagaacaaaggagcagccaagctatttctgtaaattgtctggacacagccctcctattctataccatactacaccattctacatatgaaagtcatcgtcgcttcctgcaactagctggagagcgatcatcattatgtatacttggcatttcccttcccgtctatctcgaactcccaaccactctttccgctccctctacttccaacattcagcccaatggcctttctaggctcttccgattctttcttgtttctctatatatttcggggattctcatacatgcttatgagaagcccttgatgaactgacgactttgacgacgactgatacacgaccgggaaacatagcccatctttcttttacttgtgttcgggagtcttatgtttgtgtttatgatctcttttttttcggacggttctggagggcaatctttttttcagaagttcttggtcctgagctgcatgtcctggcgttcgcatgggaagttttgtatggatggagtcgtgtgcatcatttggttaccctttcatttttggtgtctgcgctgtggctgagtgttgttgcatttcactctctttctacgcggactcttcatctctcccatctctcccatctcgagcccctcccattctctatctccttatctcgccttctcgttttcgttttgtgtcttactatattctttttggggcggatcgtgcctgatgctctaacggactacaattatgaaggtttttgacatcggttacgaactaaatatgactgcaatgcatatgcctttctcctgatcacatgtgcaaatatatttttcgacaaatgtaaaatatcatgcaaacatagaccaatgggcttgcgaacggagcattcaggagcccgagtaaggatgtggagtacaagatcgacccgaaccacctattactagtatagcatactatggatcatccgtacataggcccagaagttttgctctgcgacaatagccagccatatgtggatagtaggaagaatcccagaaccggatagcaatgaggcagcgatgacttgcaggtgacgtcgacgggaagtttagctttccggggctgggccttccaaggttgagttcgtccccacttgtaaccctgcgcgcttctatgaacgccgttggaaacgttattgtagacattcaagagggattggggattggaattattactgaaacaagatccaattgccaatggatatatcaattgcaaaacagcatctgggaaggagaaaaaggaaggagagaagaggagaataagagaaaatacaaggcagaggcaagggtctagcacgaggactgggaacaagacgtcatagtcgattctgtgttaagaactacctataaaaccagggatactccgatccgttagccacagtatctacttcaattacacgctttactccgtacatcttctactcccaacactacactacagcatcatgtcgaagaaccgggttcccatgtatctgggcctcgctgcggcgggtgcaggcggatactacttgtactctgccggcggcgatccttcagcagcaaagcaccaaatgaagagtaagtgttctgtctgataaattcctcggttaatattgaactgcctcggaacattaagctgactctctctctcgctatagttgacgctgagaaggcacgcgagaagctcccaagtacaaataacgccgagaagactggcaaggatttcggcaaggaagccggtgccaatatcgacgatgctgtaagccatgtcctgtccttggtgctatacctgcactgcagataatgtgtcatataatactaaccatccaaatttagatcgccaaagcccgcgctgagggcaaacgtatcccagagttcgcccaggagagcaaagataagcttgatgagctccgcgacgaagcaaagaacaagttcaatgccaatcgggagaagctcaacagcggtgttgatcagattgatcgtgaggtcgagcaaaaagccgctgaagccaaggggaccgtctctggctggctaggtggaaagaaataagctcctttcgcccttgagcgacaattttatgtcattattttatcacgacgctggtcgtttcgccaatatcacgaagaattccatgtctatgcaacatatgcttgtttgatgtcgatgtagtttggagatcgtgtatgccatgttttcaacgcacctggtctgcccagggcgcaacatgaaattgaatgtagctgttcaattatttcccgatagtaaagactgatttggaatttattctctgccatacattagcatcagatatcccacgcgttcggagaaatgtagaggcgctgagcttggacacagtgacattccaatgccggagtactattaccgtagtgacgagaatgccttggccatggagctgatatctttcatacacaatattttcaggaattcattatattaagactttctctcttccttttgaaacgagtcttatattccatgcttgaattgaagattttatagttcgcgctcacgcgtttctatttagcctaaaccggctagcgtgtattttcaacgcgccctcgaacgcgtctcccctttgtaccttctcggacatctcctcccacttcccactttccacttgtacactttccaacttcttgctcgctctaatatctcggtatctcttaccttgtctattataatacacttgtatccatcgcccttgcttcatttattcttcctcgacaggcaaaaatttttcaaagcagtcgcgatgccgcgcacttcccggtcaagctgcgttgcccagccagccattcaagccttcgctcggacaaccaaagccggcatcactccgcaactgcctgcaaagaagatagcatcccttccggtctcgccttccaaaaaacgcaaactgcaggaactcgaaaacttcgacaatggaagcagacaggcaccaattgaggaggaaggcacgccctcgaaaactttgcgactcaatgaattatccgtttcctcaccacgcagcggccattatgtctcgcccaagaaggcctcgcctgcgaagaccccaagtcggaccccgagtcgacgggctgcccctgtcaagaacgtgtcctcgacacccgcgaccccttcaaagcaacgaaccctgaactttgagaaggttattcctgtgaaggcggaacccctagcgattgagcggcccgcatttttcaacgacattctcaaccttcactcctcatttgtgcaagctttctccattcacatggcacacaatggcgcaaatacccctgcggacctccgagaattccttcccagcgtgacccgcctgtggaataagcgcaaggtacagatcaaagacttgcagcgtcttgtgtgggtctgggagcagagttcgaaagcgaaacacatttcatatcgcctggcaaattatggactcggtaaaatatgcatggagcgtaccgtgcaggccaacgtgcagcccccagctttgcaagactctttcgaagaaaccttggacttgttgtgggaaaaggccccggaggcccttcgggatgccaatgaggaggaccaagctactttgttcatcgagtctctcggtctttctacaatccacgaatccctcaccccttttacggttttccagaaaggccagcaacgactccaggatctaaagggcggtctgctccgtttgaaggccgagagaatgcgctcagagtcagcagagacgactcccctggagcggacggcaacaataagccgccgccagagcctgctagatcgcattaagaacaaggagctacgccagtccaagcttccccctccgcctcccaagaacgagctcctacgacgtgcagccgccgatcgggcggaggagatagctgggattctggccatgttgcgtcccgttgggtatgtgggcaatggtatcaaagccatgcttgcagcccaacgcaaacccttcaaactcgacgtgatggtcgagcatgtccgtgactcagtccgcaacgagattcctcgtgaggaggtagagatgtgtcttgagattctgtcggatgcaaaggtggctggtgactggatcagtgtggttactgttggccagatgaagtcggtcgtgttgaagtcttgcaaggatgtatctgccaaagacattggggcgagagccgcccagctgaaggctgactgggagaagtctgcatcttgtgtgcagactcctttcttgtgatttatgatttttctttttggtgtgttcttttgtctttcattgttggatacctcgcatccgcggagctggtctgctcgcggtcttgcatcagcgctcgataccctgtactttaccatatgtctcttagcatgaaactaccttaggtagtactttagcaactaggtcctcggacgcccaatcataatcccactaccacaagaaaagtcaaccctcgccatgtctaatgtttgttaattttttttccccttgttacttacatgtacaactagctagcaagacgaaaacgatgtaaatagcataaactttctacgtacggattaaccaccaaaattacccacttaacgcgcgacgcgtgcacggaccacacgaattcaagcgcgtcgaattggactcgtccaaactaccctgataccagcatttgcgttgtcctttgctgcatttctttttacatcaaccgacaccatgtcttcccgacctgacttgaaggtatggattgagctatctaatattctccaaacccaccaatacagcattcactaactcaaaccctgaatcgacgcaggtcgacgacgaagttggctttattggcttctaccgtggccttcctgcacccgataataatgaaacaatccgcgtatttgaccgaggcgactggtattctgcacacggcgccgatgccgaattcatcgcacgcaccgtctacaaaacaacctccgtgctgcgcaacctaggccgcagcgaaacaggcggccttccctcggtcacaatgagcgtcacagtcttccgaaacttcctccgcgaagctctcttccgactaaacaagcgcgttgagattttcgcctccgccggctcgggcaagagcaactggaagctggcgaagcaagccagtcctggcaacctgcaagacgtggaagaagagctcggtagcgtgggcgcgctgtcaatggattctgcgcctattattctcgccgtgaagatctccgctcgggcagcggaggcccggaatgtcggcgtgtgctttgctgatgcgagcgtgcgcgagctgggcgtgagtgaattcctcgataacgatatctactccaatttcgagtctttggtcatccagctcggtgtgaaagagtgtcttgtgaccatggatacggctcgcaaggacgtcgagctggcgaagatccgggctatcgcagatagttgtggtattgcgatctccgagaggcctgctgccgatttcggtgttaaggatatcgagcaggatcttacgagattgttgagggatgagcgttctgccggtacactgcctcagacggagctgaaactagctatgggatctgcgtcggcgctgatcaagtaccttaatgtcttgactgatcctacgaacttcggccagtaccaactctaccagcatgatctgtcgcagtatatgaagcttgatgcctcggcgctgcgggcgctgaatcttatgcctggtccgcgggacggggctaagactatgagcttgttcggtttgctgaatcactgcaagacgcccgtggggagtcgcttgttagcccaatggttgaagcagcctctgatggatctgggtgcgattgagcaacggcagcagttggtggaggcatttgttgttaacactgaactgcgtcagactatgcaggaggaacatttgcgttccattccggatctttaccggttggctaaacgcttccagcggaagcaggctaacttggaagatgttgtccgagcataccaggttgccattcgtctgcctggatttgtaagcgcgctgagtgatgtgatagacgagcagtaccagacccctctagagacggaatacacctctaagctccgtggttattccgacagcttggccatgctggaggagatggttgaaacaacagtggatcttgctgctctggaaaatcatgaattcattatcaagcccgagttcgatgacagcttgcgagtcatcaggaagaagctggataagctacgacacgacatggatatggaacaccaccgagtttccaaggatttgcatcaagacatggagaaaaagctcttcatggaaaatcaccgtgtgcacggttggtgcttccgtctcactcgaaatgaggcgggctgtattcgcaataagaaagagtaccaagagtgttcgacccagaagaacggcgtatactttaccacgtccaacatgcagtcccttcgccgagagcatgatcaactgtcctcgaactacaaccgaactcagaccggtctggttaacgaggtcgtcaatgttgccgcttcgtattgcccggtgttggagcaagtcgctggtgtactcgcacacctagatgtcatcgtgagctttgcccatgcttcgatgcatgcaccttcgggatacgttcgcccaaagatgcacccccggggaactggaaacaccgttctgaaggaagctcggcatccttgtatggagatgcaggacgatatctccttcattacgaatgatgtttccttgattcgtgatgaatcgtctttcctcatcatcaccggtcccaacatgggcggcaaatctacatacatccgacagattggtgtgattgcactcatggcacagatcggctgcttcgtcccttgtacagaggccgagctgaccattttcgactgcattcttgctcgagttggtgcgagcgactcgcagctcaagggtgtatcgacgttcatggcggaaatgcttgaaacgtccaacatcctcaagtctgccacctcggagtccctgattatcatcgacgaacttggccgtggaactagcacatacgacggcttcggcttggcctgggctatttcggaacatattgtcaccgagatccggtgctttggcctgttcgcaactcatttccacgagctcactgccttggcagaccgttatcctaaagccgtcaagaacctgcatgtcgtggcattcattggaaacggcaatgagggcgagagtgaagctgaaaccgaagagaagaaaaagcgccaagtcactcttctctaccgcgtggagccaggaatctgtgaccagtcctttggtattcatgtggccgagctcgtgcgcttcccggataaggttgtcaacatggctcgtcagaaggctgaggagcttgaagatttcacttctgcgacaactgaaaatgggcaggcacaacttcctgcgccctcgcttgacaaatactcgcaggaaggggtggaggagggcaacacgctcctcaaggaaatgctgctgaaatggaaggcggcaactgagggcaaagagatgacggcggagcagaagcgacaggtcatgcgtgatctggctcaggccgatgaaaaattacaagcaaatcaggtgttccaaagtatcaaggctctatgaggatgtgagctattcatgggatttggcgttgatggaaggaatgggtttgaaaggcattgttgtatactcatcttttacatgttaagataacctagcattctactttatactctaatctcttctagattcttcttatagttctcttataaagtagccaaaaggttgtaacgacggagtacggagtatactccgttaatatagaggccagtcacgtgtaggtcggtctagatgatcaacgcgggattgtgacgaagccactttattacaaaatccaaatgatcgttctttttattgtctccaattcgttcatttgaggtttcaactttcaacaaaccctttaagcctggacttgtgctgtcgctgtgtctctaaaccaccctcgatcgatcgcctcatccagctatgcgcgcaacctcaacgcggacgtcctgaaccatttcgattcatgcaccccttttccgttctcactcttgggatcttcgtcgcgggctatattaccgctaggtgggaccttgttacccgtctatacgaattggccatcttcgcctgggatcacggtgtcgtggtatgtcttccatcggccatcggtcctttgctccgcttgcgactttatcggcttggtgccagcgcacgttatattttcaatgtcgctaatttgctatttagacacgaactgcgaaggggtttttgtttctctccgtcttctttttcctcctcgtcctgccgatcaaccatctcgcgtctaaagagggccaattggtgagccagaactaccacagctgtgggcagcgatcgaaagataaagcgcttgatgctggcttatgaggatttgctaacaggagatatatagcatccgcgccacgtgaatctcggcgtctccgcgcgcgaacaattgcgtcgtcgaggttcattctgagaaaggtggaggatgacaatatgctcatgggtgatggactgttgcgggtattttggccatacgacctcccacgatcctcgtccccgggcgtgattgtcggatggcgaaactcggagcttgatttgtttgtgctcacggtgctggaagatgtcgaggtaggtggttgcaattgccttgtctgctcgttcgatataagctgatcatgctcgggatgaatagtctaaaaatgttgacaatgctctacgggcgggtattctctttcgaaacagccctcaccctattgtgcgcatcttcactctatgtggacgctctcagatgcatgtcctcggctcgaccaactctcgcgagcctccgacttctttcaacccttcccacctggatgtgactacaatattgtccccgaaagctcctcgcatcttctgcccaccagaggcaaacctgtctgtccaggtcatcatgtaccaccgcccgcacccaacacgcatggaatatatgtcgctcgatccgatttcactagccttgggtgataaagcgacgaagacagaaatatgggggccatcatcagatacgatcgaatcagaggaagagggtgacaaggttgggcccaagttgttggttgagaagctcaagcttcatacggtcgtcaagcacattccatcacagaaggagcaagccctcccgctcattatcaaccaagtcaattgtgcgtatgagatgggacagctcatgcacagaaatagccatttgattggaattcgggcgaagagaagtatgagcgtcggagaacgtgtcgtggaatcggcgacaactttatgggggtttattgtcctttgcattgcacatgttttctggcaatggctttggcccgtcgtcacccgcatcttcgtgatcgggcttgtatgccaccggtctgttgcggaaattgtcttgcgggttcttgagtggcgtgctcggcctgatgccgctgctctcaaggatatctcagcaacagcccaacaggttgatataagattgcagcagttctgctactggccgattcaatatgtcaagcttcggcaaaggaaggataactgggagagtgtcacgaccagtcatccagactatattcggttctataacagtctgtggcttgttgccaatgatgtgatcatcgggattgcgttggggtcctacattattgacaacgcgaactgggttgcttcgcaaatcaacactgttttgaccggctggacggtggaggggttacagcgcactatctcgtggctaatggattggccagccggcttgaaactcaacaacgagctggcggcgttcctcggtgacttgtttctatgggtcattgagaactgggcagcttgcattgccaaccttcagccttacctccctgctgtcatctacattgttggatgttcaagttttgcaggagctagcatgccaatcgctcttttctccgaccttctttcgatcctgacggtccacatatactctttctacattgcctctgcccgtatatttaactggcaactcaccattatcatttcccttttccatcttttccgtggaaagaaacgcaacgtcctccgcaaccgaattgactcatgtgactacgacctcgaccaactcctccttggcactatcctcttcaccgtcctgttcttcttactgcctacagttgtggtgttctaccttacctttgcctcggcccggatgttaattatttcaatgaaggcagcgcttgacacctgcctcgcgttcttgaaccatttcccgctcttcgcgttgatgctccgcgtgaaagactcgcgacggctaccaggaggtatccgatttgagcttcggaatgaaccagacaagaacacagcagacagggacttgtctgcgctggtttcttacatccacctcgaggtatgttacatatccaaccaaaacatcgcctcagaaaagctgacatattttttagtctattcccctccccctacgtgcaatgttcgaccaatacttccagctgggccaccggctccggaaacactacctcgcacctcgcgtcatcttctgccttataaccggccgatttgtgccacctatccatcgccgcaacctctatagcatgcagtacagcatgctacctgcccgtcgtgctggtatggtagaggtgtggacattgctcacacagccgaagaaaggcagtggtggcagcagtggctctggatctatgggtgcaggcattggatccttgagtaacccaatagcgaaagttccagcgaatttcgggcagagtgatcttcggagacggggtcatcgctgatacaaactccctcttgtacataatgccgataatgcttttatactaagataattctctaatattgccttgctagaataacatagaatggataaagacactcctggggcataatagagatatatattagatagaacggtctccaaaagaccacaccgttgaacttttgttcacgaactgtaatggccagtgagttgtatgtctagcaccagcctaaagataactgcgtacataattctagagcaactttaatacgaaatcacatcactgaaaacagaacctccacatcattttactacctttccacacgtttatgtagatgccgcctctgaatcagtatgtctctccgaccaagacaggaacattgtgaccacacgagctctagtttttgacgcgtaacatacctatcttacgggaaacagcttaccgtgggctacggaaggaggtcatctattgggagatccagctcatttcgtccttccgagaatggctttgtaacacaaatgggcagagcagctataacttgactatagacagacgggagctttgccattcatcccaaaccagtaagcattctttcctcaataggtatattgacaacgctaatactttgacgacaaacagcggatacagtcgcaggaggttttgacttccctctgaatgctcaagataccagccctagtaatttcatcgcaaacgccgccacaatagtgggcggagaagatcacccggagtcgatggctttactgtcgtcagcttccaatggcgtcaaggggacatgggtcggtgtggattaccggattgggccagtagtgatagaaacaacaggccatccaaactgtgaggactgcgcacctgggtaattgaatatactagttccatcacaacaaccggcaggtacggcatgtggggaaataacggtctgggggccttgagggtgtgattgaactgaggctctcaagttggtgtaacatgagacgaacataagcggatagaaatatcagagaagtcactgtaattatcagcttattctcggtctggtctgattttctcccccaacccccttcattcgaagctaggtggtctgtacaggtgtggggatcattgctagtctctgtgccacttcggccattccagcgctccgccagacccggtataccgcgtagtcaccacgttcgtctttaggcccacaaagattgaagatgttctgtattgcctcatctgtgatttggtttccatccgttgagaaaaaaagtacaccactctcagtgaggaaatcaggccggtcgagaatgacaaaaaaggtacgagatggtacggcatggctacctcactcccgggatataactttgcattcgatcctgcgggaaagtccggccgtcttggtgaaccgatcctatagctacctccggtcgagatttcatgagatcccggtgcgatgctaggataacacctagggattgagatgctgagaagaactcaaaggtgattgtctttcagcgaggaattttattgatgatcgcagcagtagaggcctgcgcaataggcataagtcctagcccgagttattgatgaggaaaagcgatatgaataatgtaccgaagggctggttctggtactgttgttgtaggatgcgatgtaatgacgacagacccctcggaaggtgattgtaaattgaaatccccatgacgtagtgaattggcttttctatgtagcaactcgatgacctccggcgctggaggctgatatgctaaggatgggtctccctcatcttcgtccaaaccataatcgaactcataatccccaatattgcagtgactcagcctagctaacgacgatattgtccgcaagttgtgacgcattgttcggcactttcgcaccacgagttcttctctttctgaatagacaacacatccatcggggattgttgaaggatcaaagctaaatggggagaaccactcaatccgggaacggagatcaactttcgctctaagcggaaaacccgattgaaatttacccacggcggacctgattcggcttcataatccggttggccgctagcacggaagctataggatgtaatcactaagagaaacccttgcaaaagtcggtcctcgttgggtgccactttggcaataccaggaaaaagcccttctcccgggaaattattctttcggtgaagaatctcgcgtctttgatgctccacgcaggtgaatacatcaggctgaggaccgtagatctcaaatgacagttggggatagtcatggatcctcgaagagagatatcgacaaagagcggtatattcatgctcggcgtccaagtctaggtggacggtactgtaaacctggatggcgatttctggaataggatctaccaaggcttcagggttggtcgcccttttcgccatcaaaatcgcaggttggtttgcatggtctcggtaccgttgcgcattccatttcgaaagcggagccctccaccagtctttgatcctagctatcgcgctgtttcttctgtgggatgagaggggacttccaaggttggaaggctaaggcgctgaatagcaacgcacgctcccatcccgatgtcagtcacgtgagccacaagcgagcggtagttaacttgtatgtaataacatttgcaggcatccaagggaggtcgcgtcttttatacaatgtaggttgatggcgtagtgaggcgctaaatccaaaaaggcaaaactaactcgaacaggcaattaacaggtccgccgtttacatggaagatgcatggtatcgctgaaaagaacaaatggcgccagagccaggctgcttttacgatcatccgcgaatcagggcgattcatacagggatttagatgttcctcttcaagatttcttgaggaactctgcatccgtttcactgctgccgctctttcgggcatcatcgaccatggcgtcaatgccccgttccttgagaactttctataagcattacacacctctgtcagacatcttgaatatatagagacacatagaggacatatcacaaggcaggacttacattcaaacaccccttgtagttcttaaataatgcttcgcaatcattggatgaagtgttgccacgcagatattctgttctaggattagctgctgctgtcatcgaggccttttattgaaggaaaatagtagcatactctcactataccacttgaggaagcaagtgtcatatttcctggtatatatattagcttttggttaacactttgaagctaggtatgttcactatagctcactctttgatatcgttacattcgggggcgatagaagccgccatattggacgtaataggagatagtttatcagatgatatccggcagaccttatacttttcttgctatgtcgaactgagtatattgagtattttagaggaatgagaggaaaagaatgcggtgacaactcgaagatcggcggaagtccatacaaatatcgccactctgggaaggcggtcagggcgggcctaccatttctccattgacatttttttcgggaccttgaatcttcatgtcactactgtttcgcgtttcttttcctcattcttcctttcgctagatttagtgaactggagctctgcaagtcatcatggactctgcagaatttgcaccgttccgggagaagttaacctccgctctggtgcaggtgacgcgaactgtcggacagctctcatcggaagacctgaacttccatcgcacctccagcgcagaattttctgagtcgctagatgaacagagcgcgcgcatcattgcgctaacctccgccgttatcaaagctgccaccgcgggaaccgatgtgactggaccaacccttcacgatgaagattccgtcgaggacaattggcgtggcgtggtggatgtgattgactcgcttttggaaaaggccgatgcctgcttggatgaatttactggtgtgattaagaagctcagcccttcccaggaagaacgtgcaccgatcaagaaagcgcccaacttcccgactatttacgattatggcccctccaagatccccaagccgcaattgctcttcgatcgcaaaccggataactctgatatgagcccctttaagcctcttctcaagtctaagcctcatgcgattgtaccgttggagaaatgcttgaagacgaagaagatagaaggtgtaattggttatcctcacccttatgaggcggagattcttgcttcagagtacccgaagccggtctatcaggtctcccctccggttgagtatctgccttttgagagtaccacggctactttcgtcgataccttggatggagtgaaggaaatgctgaaggagctcaagaaagcgaaggagatcgctattgatttggagcatcacgatgtacactcttatcacggtcttgtctctttgatgcaaatcagcactcgggacaaggattgggttgtggataccttgcgaccttggagagaagagctgcagatgctgaacgaggtttttgcggacccaaagatcttgaaggtcctccacggttccaccatggatatcatctggctgcaacgtgacttaggcctatatgtggttgggatgttcgatactttccacgctgcatctgcattgggcttcccaaaacgaagcttgaagttcctgctgagcaagttcgtcaacttcgaagctgataagcggtatcagacggctgattggcgggctcgtccacttccaccggccatgttcgactatgcacgatcagacacgcattatcttctttacgtctacgaccgcctacgaaatgacctgatcgacaactccacggaagaggcgagccacattgattacgttaacgagcggtctcaacatgaagccttgcaacgctatgaacgtcctgtttacgatgccgtcaatggatatggccccggaggctggttcgatatgttgtggcgcaactggagccacctttccaaggagcaattcgccgtcttcaaggctgtccaccaatggcgcgatgaagtagcgcgcacggaggacgagggttggcagtgtgttttccccaagcacatgctcttcaagcttgccataactatgccggttgatttggggactctattccgaaccctgtcacctatgactccgattacgaaggaacggtcacacgatcttttggatgttatcaagcaagccaaggttgccggtattgatggtccagaatggcgcgacgtggcaccccctaaacacctcgcaagggtcctagaggctgccatcccggaagctgtcgatttccccattgctgaacgctatgaaacgtctcaattttggggcaacgtcttggaagccagggaatcacccactcccccagaatatgcgcttgccgccggtgctgaggctatgcgcctttctctccccctgccacccatgccgacgaccgtctccgaaacccgtgaccacctcggcaccgcaaaacccgctccccttaagcccacacccgctccccaggagccagaggagaagaagtacttcactgtcaaagacctcggcggtccccgcaaacgaaaggtcactccaatcaacaacccagagcaagccctctccatcgcagccgacctcgacgacacaagcaacgaccccgactccacgcaaaagaaaagcaaaaagtcgcgcagggagaagaaggccaagaaatcgaaatccgaccccaagcccgagggcgaggctcccttcgactatggcaacgccgacgccgtcctcaacgcgccgtcttctgccacagtcgcgcaccctcgcaaaaaggcttacaacccgtacatcaaagcgttggaagccccctcaggcgcgcggaagatcaagcgggaaacccccggtaagtctcttacgttccgcgaatagacggttagtccgtcaaaaaaaaaagcatttacgaatggggttctggttgggttttctttcctgttgtttattgtttagattattgttagttagcatagcgatacccgtcagttggagactctgggattactgtatgtacatgtatagaatatcaggttcttctcggcaaagagatagtgtgctattcttgtaaaattaatgtttattctatttttgctttttcaaatatttctcgatcaacagtaattccgcttgaaacaccatctgtctttgatctagatccacgcgatagttagtaaaaggagactatgtttcactaagcccaagcccacaagttttctgggtctaagtctaggttggactccgtatggggtagaagtcaaagactccgcattgaccattccccgctataaaaagcaaatatgaaaagaaacatcaataaatgcaaagttaaatgaatcgcaaacgccaacccgggagcataagtacataggtgcgtactttgtctggtttcccgggactttttttcaacgggcctaaagaggcataatgggtgcgacgatcgtatccggtttgatgggttcggagagtaagataggtgaactcgacataattatatgcgcagtaatccaatccgtactccgaacagcatagcagaggatgacatgcacacacccactgccgatccctactatatcgccgatgataacagctgaagcctgatggtcatggattccggcataagcggaaggattcctatccgagcgcgaattagcggaagcccggatcgctcaagcgggccatggatgtctaccctgtttttttgtagtacttatacacagatggattttatatgcaaacactagccatggatggaagtatgtggtgatacatatcaggggttggcaagtgatctacagagccttggcgcgtttcataacaggatgggatgcatattggcccgtgtgaatgatcggccggatgaggatgatattctcgagggagccaaaagccatgaagtcatgtagagccatgttcggtaatcttaaaatgcatgtctactttgtacatctgcatgtgtattatgtgtagtatgcatactacatcccacatgcatgtattgataaggggaagttcgcggagagaatcaaactctctctctgtctccccccactcactccactttttccgttcaattacccctgagaaagaagcatagaccaggaatgcactgtcgaccttgaatttataacgtccgtgtcgagggattttgggggaaaaaaacctcaaggtggattcagtgcacccccgcatagtttgctttctaatgctgatatcaatttaaatcaatcagcccagttccgcatatcattcgatattcattggataacaagaaaaaggcaacttggaaccttgaagactcaaagtttggtttcttcccaggggttgtcccagtccactggtactgcaaccccaacccactggttcaatccgggactacatctatgataggagaatatcgcagagaatatcaagaatcaaataaaaagtaaaacatctacaagcatgtcggatgtagccgagactccgctatggtctgagacaacccgtaggcataccacggatgtatattgtacatcgtatgtacctaagtggtatgactcttggaagaatgaggccatagtcaactaagtactgaatgtgtacagaagtaccgaatacgtgagaagattgattacgcgtaattaattgataaggccatactccgtacttggtatgggctcaacctgaaaccaggttgctgtgtcgagtagtttgcgagtattgtatccatattcatatattaggattcaattctaatctacggacaatatatatagacatcagcattcaaggaccaagtaacattcccgagacatccacatggaggtctcgtgggcttagcctgaacggttcaagtcttttacaatatagacgcaggtaccggttagcgcaacccccctgcagacatgaaaccgtgtcaccttcctgtaatacatttttattgggttgtgttatgtatgtccttgatgttattccttttctcgacccgttaagaaatataaacagagagatctgacgtcaggatgttctatgattgacaagtaaaacaagtcaaagtacggcttgaagttagcgcgcatgggccaaatcctgaagacaaggatgttgatcgagatcttcctaacagtccagggccataatctccagaaaggagggtgttcctaatagtggcgaagtgcattgggccaggggtaaaaaaaaaggctgtcccccttgcataacaagatacgtctcattcccaaatttgtttttttttatagaagagagagaatatggcagtaaaatgaaatagaaattaatacgaaataataacacaaaagataaagcagaaaaatacaaaaaaaccagttccccagaaccgccctaacagcagactaacgaaataaataatctcccctctttactttacttgaccctcaaccctcccccccctccttcttcttcaccttgatgattcttttctttcttcattgattcaccacagtaccgtggtaaatcggtctcgaaaaccccatatcctcggtacgggtgtctcctcttttacggccccattctctatcctcaagtccctacgccagggtcatcgcagtacatagtcaactctgacgatcgtcacccccccctaataccacaatgtccgttgcgacgatgctacaacccgcatccagacagtcacgggcatcctcgtcctcgtcctcctcgtttcaacccgtggcacggcataacacaatgtcgtcgcacgatactcggtcgctccgccaatccaagcggatgtcggtcacggctctgtacctttccatgtccgccaaagatcgagacttggagatttccgatgacttggcacgaggtacgaattctggcttatccctaatggtcgcgctaatcctccgacagcacagaagcacctgcgcgatttgaagtcgaggatctcctcgcaatcgaagaagaatttcgtgttggaaaaagatgtgcgatatctggactcgcgaatcgcattgctcattcagaatcgaatggccctggaagaggtaaggatcctattttcgtggcaatcgacacacatccgctaacctgtctttcggtccagcaaaatgaagtcgccagccacctcgacgatacggcagacccgcaggaagggttcttcccgaacgatgaacgaacccagaagtacggcaaccttcttttcctccttcaatcagaaccccgtcacatcgcccacctctgtcgactcgtttccatggctgagatcgattctctcctccagaccgtcatgttcaccatctacggaaaccagtacgaaagtcgcgaagagcatcttctgcttactatgttccagtccgtcctcacctaccaattcgataacacaccagagtactcgtctttgttgcgccaaaacaccccggtttcacggatgatgaccacatacacgcgccgtgggcccggccagagttatttgaagcaggtgctagcagaccagatcaactctctgattgaattgcgggacgtggatctggagatcaatcccttgaaggtttacgaaaccatggttaagcagatcgaagaggaaactggctctcttccagattacctggcccggtctgtgactgccgaggatgctgctgaaaatgcgcaggtgcaggccatcatcgccccacgtttgaagatgttgacggatatcgcaaacggattcatcacaaccatcattgactcggtagacgaggctccgtacggtattagatggatctgtaagcagattcgcagtctgtcccgcagaaagtaccccgatgcacaggatcaaaccatctgcactcttatcggtggtttcttcttcctgcgcttcatcaacccggcaatcgttactcctcgctcttacatgctgattgatgctacgcccacggacaggccgcgccgtaccctgacgctaatcgctaagatgattcagaatctggcgaacaaaccttcctacgccaaggaaccttacatggccagcctacagcccttcattcagcaaaataaagaacgtgtcaacaaattcttgcttgatctgtgtgaagtacaggatttctatgagagtcttgaaatggacaactatgtggccttgtcgaaacgggatcttgagctccagatcactctcaatgagatgtacgtcatgcacggtctcctagagaagcacagtacatcgctagcccaagaccaatactcgcacctgtctctgctgctccaagaattgggtggagctccccctcaagttccccgcaaggagaaccgcaccatcaccgtgcctttgtttagtaaatgggagaccgctctcgatgatttgacagccgctctcgatatcacccaagaagaagtgttcttcatggaggccaagtcaacctttgtccaaatcatgcgatccctgccacagaacaccttagttgcacgccgacctctacgcctcgaccgcattgccgaggctgcagcaaccttgaaaaatgatgccgtaatggtgcgcaagggcatccgaaccatggaactcctcagccaactgcaagacatgggcgtgattgaccgctctgacgagtttagtttgcttcgtgacgaagtggagcaggagctggtgcatctaggctcactcaaggaaaaggttctggaagagacgcggaaactcgaggaagttttcgcgactattcgcgaccacaatgcttacttggtgggccagctggtaacatacaagtcttacctccacaacgtgcgtagtcagtccgaaggcaagaaccgtggcggcaagacgccaaagaaccaggaacttggcccgtacaagttcacccatcagcagttggagaaggagggtgtcatccgacgcagcaatgtgccagaaaaccgacgagcgaacatttacttcatgttcaagagtcccttgccagggaccttcgtcattagtctgcactataagggtgagtccttggatttaatcttcgaggaaaacggaacatcattgctaacgcattatttaggacgagcccgtggattactggaacttgatctcaagctggacgatctcctggagatgcagaaggataaccttgaggacctcgatttggagtatgtccaattcaacgtcaccaaggtgcttacactcttaaacaaacgatttgcacgaaagaagggctggtaagggcgctatacaccccaggctccccagagtccccctttgatgaatgatgagctcgagcggaggtcggacagctccccctatttggtcttccatatttacttcgcctgctcagccacctgatgaccgaccgtgccctaggcgcttaatcttgcgatgaagatggacaaatatgtcatgcctctccatcccaaataatagatcggatgactgctctatgcaccgactgaaatctgcccatctatgcagttcgggcgaatgccctttgtgcgtgtcgccgacacgcatatactcttaatggagaatgatcaaggccctctccccgctggtacgggggatgtcgatgatcctgtgatttgtgtcctttcccctatcttttcctattatgcttgccattcctatgtctctcatcctttcaatgtctatacccagcgcatagttgttaccatttgtttttttcccggtttcattgggggcccgagccctataatcccccggcatgtccttctgttttgtgtttcaatcaccgcccaggcctgtccggtctcatgcgctgtgtataataatgcctatttgtgatgctgtttgttgaattgttttcaattgaatacccgtatgttatgttgtgaatggtttatttccccacagaatgcctaggcagattacaattcatttcgggactggctactgtgatatatctgtcttctttcgtaaggtctaatatgtcaaatgctggtgtccactgatagttatagagtggattgattcgtcactcgacacctcgacaccgccacgtctgcccctcgcctgcttgccccctttttctcgagtggaatcttcttttcaagtatgcgagctgtctgaatatcaaatttaataaaagaatagtacaaatttggagtcgggaacagacaggaagtgctatatattctatatatgctaggaagtacatacaatagtcgatcctttatacccaaatgacaacccaataactcaactagtagtcgacttgcaaaatgacgatagtattggcccctgtaaatccctgggaacttctttggcaaggtggttttattgttgttcaataattagaaataacattggtccctagggatcccccaggcttttttttatcataaaagtggccacttacgctaatcccctccctccgcctcccgctctttttccagaacaacaaccctcctcttcccttcgaccatatacctcccatcaatcacaatggcggccacagaatcccagttgcctacggatcctaagtacgaccactacgacttccccaccaccgctccggaaacgcagcctggtcaccccggccacacctcccccgagcaggatgcaaaggtgcaacagctccgcgctgagctcgaaaagctcggctacaccgaacgcttggatacgctgaccctcctgcgattcctgcgtgcccgcaagtttgatgtcgaggccgccaaaaacatgtacgttccttgattctcaaagggcatggatgtttgttttttggagtagttggcagaaagctttctattccggaatttcttagctttcggctttttgtcgaggcctaattgtctaacttgatatctcaggttcactgcaagcgagaagtggcgcaaggagttcggcaccgatgatctggctcgcgacttcaactacaccgagaaggaggaggtcttcaagttctaccctcaatactaccacaagacggacaaggttggttttctgtagcttatacgtattcagatgcaatactgacatagtcccaaacaggatggccgccccgtctacatcgagaagctgggcaagatcgacctgaaccagatgtacaagatcaccaccgccgaccgcatgctgcagaacctggtgtgtgaatacgagaagctggccgacccgcgtctgcccgcttgctcacgcaaggccggcaagctgctcgagacctgctgcaccgtcatggacctgaagggcgtgggcatcaccagtgtgccgtccgtctacgggtacgtcaagcaggcctcagacatctcgcagaaccactaccccgagcgtctgggcaagctttacctgatcaacgcgccgtggggcttcagcagcgttttcagcgccgtcaagggcttccttgaccccgttaccgttagcaagatccacgtcctcggcagcggataccagaaggagcttctgtcccaggtgccccctgagaacttgcccgttgagttcggcggcacttgcaagtgtgagggtggctgtgagctctccgatatgggcccctggaaggagcctgagtgggctcgtacccccaagtgggccctgcctaaggaggagccccctcacgctggtgagcttcttattgaggacgaccctgcacttgcgaagaaggatgtcgagggccaggaggctgctcagactagcgcctaagcttgctgagcacgtttccttgtcttcttcgttggagatccaacaagccgattgacaatctccttttatatggcgactgaaaacagacacccagatggggatgctggaggtttattttcaactccgatcaacctgaaaatctcaaaaaaaaaattatctggcggttcgacaacccccaatacaaccccaattccacaaggcaaaccggaatttctctcttctggtagtttcaacacctctttcccgatccatccacagcatgtggacccttaccctacattcgctttttgcgtgtgctttttttgttccgatctagatatcatggagagcttgcttttgtttttgcttttgcctatcaagataagcagcgtgtggctgccactgctctcagtatagaagggacaggacgcgatgaaatttaaaagcgagttggtgtgaagatggtgtttatcttggttgtttctttgttggtagtgtatacacgaatgagcacatattgaaatggtagctgtcatgtgtaggacactatttggtttttgttatgcttatgcttatgatatacgatgtagtagcagtagcagtagcagtagcagtaggagaagtagaaaaccaacaatatttgcctttggtatagagatcgtagacagagtttagtctgaacatgaaagacgatatgtaggattttgactcaatggagccatcaagaagaaaagacatggtatcatgatccctaggacaagcccaggccccccaaacgcccccaacaaattgcaagcataaaaagaaaaaaacgaagaagagaacgctaatcaaccaaccccaaagtcctcaaggcaatcacttattcatattctccacaacgtcagcagcacggccagctctctcagccttgcccaccgtcgttgccaacgcattaccctccacaccggcctccgtatcagcattgccctcgccctgcaagcggagcaacatccgcagagcatcctgatagacactcgcaatatccccactcttccaccgctcctgctccgcctccgtcccgagcgcagcctgcaacgtccacgccgggtcgtactttgcacgggcctgggcccctgtcctcaccgacccagtgccgttcgggatagaatcaatatccataccatccggctcttggccgggtattgtgttctcgttttcattattcgattggggctgcagattcgtagattcgcccatttccgtatcgttatcggcatctttccccccatttccaatcttgtcttcgttttcatattcctcttcctcctcttcaatcatcttcttcaaatgcgcggcatattgtttcgccgcacgtctcggcgcatcccgcctctgctgcgcgactgtcgtgtttagagattccagctgcgcgtacagcgatgtcacacgcgacgcaagttctgtatcgtatgcttcgtactcgatttgttcagtcggcgcggtgaatgctgccgggaaagggaactgtggtgaggtggagtctatgccgttgatgctgattgaggttgaggctgattcgaaggtttggtttatgtactatttgaagttagagtctagagatacgtggatttacatgttgttctggtctcacttcgtcgattagctcccggacgcgttcgcgcatcggatctggggtgtcattatccgttgcagaaggggggaagtagaggtcgagtttgcggcgcgatagggcgactgtattggcgtagaggtaggtgaagtctgctggagattgaagctcgacttttcgatagtgtggtgctgccatggtgggctcttgtggttgttgatgtttttctctgttccgatttgtaggagaaatggccttggcattccaaggttcatccccgcaaacgatgtcatcgatgttgcaccaacttactctccaaggttgactttttttgctctattgtttcttgttttctgctatttatttctttcgttaagataatttacagataatctacacttcttcctcctcatcttatatccttccttctactctgatacgaccccttgagataatgcaagtgcagcatactcagtgatattctacactacagggctcgaggagccattgggacacatcaccactatcctagacattcctttacataccctcacaccgaatatggagaggtcgacttccatttccctcgtggataacaccgtcccacagcaacccaccggtgaaggacctccaccgggcacatcaactcatcaccacaaaagcctgacgaagcacttgagccgtgcatccgtccacagccagctcgcaaaacggaaatatgcaaaatggcaaccggatagacttggcattaagcccgacacgaacgactcgcttagccgagaatcgtcccaggtgcgcggagactcgatatcagcaagctccaccggagaagccagcgggaccggagatattgagacagctgacattgccccgtcgcgagtctcgactaataatgggagcggcaacggcagtggccaggcgaccggaataggagaccaatccaacggccatgaggacaccaaatcccgctcagagatggacgttctctacgagaaccagcggggctggttcgcttttggtatcccacattactcgcacagctcactgttgaactttgatcccagcccctggatgactcgggaccgcagagtcagtcctgttaatatcacaaatgcccagctgcctgatccgagctgggagtggacgtggaagacatggtatgtcgacatgtctggtgataccgatgagcaagggtggcagtactctttttcgtttgcctcgtcttcgtggcatggcacgcagctgtggttccattcgtttgttcgaaggagacggtgggtgagactacggactaaggcccatccacggcgaaatcgtgatcgctcggacttcgagaaagcccacatgcttaatgaggactattttaccattcattcgtccaaggccagaagtcgggagcaaagcaccgcaggactgtcccgggtggacactggattcttgactcatgctagcgcgacggtcgatgaggagtcagatgtcgatgagattgcggatatacctagtttgatgcatgctttgaaattagcctccattgatcgagagaggattgatgcactgaagaaatttattgaagttggaggcgacgagctctattatctgaacgacaaggtgagctgggtgatttcctctaatctatatgttgagaccgggctaactctattttggcatatcagataccagatataatgtccatgttcttattccagacctcacgctggcaatttgtaacatatctttctgatgtcattcgcgggctctccaaaactcccactgattctgataaagacgccgatgcagtccaacgcaagaaagacaatctcgcccgtgccgcagaatcctgcaagcatcacattaccgggccggatttctttaaagatgatcatggggagtcaggaacggaattgttagacttgactccggtggccaggcatgatacactaatggctaagcgaccggtcttgaaggagcgtgtgaggtcgatgaaacggattttcaagggcattcccaaggccgctgagattggccatgaaggacacatttattaatgtattaaaagctctctgtatagaccaaataaatgttgttattgggagaatcacatagcgaagtatagcagctcacccggcagagccaacctccggccaccgcctacccgttcggcggctagcaattttcggggcaaaaaggtccatcgaaaaacacctcagcaacgcgcccaattctactctcctttccattcatgtctccggtgccattagagcatcgtcccttatgctcttgcgtggccgcccgtgtctaaggaggcgtctttctgccgtcttggacactgtcgcgactggcccgtatgagcctcttctgtttctatatcctcgctgggctgcgcctgctttgcaacgccgacagatatcttccctgaagtcgattgatactccagcgaggataggacatacttccagtggcccaattcgcgcagcagtccgcccttctccttcgctttctcggcactcgcgccaatggatctcctctgtgtcttccgcccggtctcccgacgagtcaaatctgcacccgtcccctgcggtggttggagagaattctaatatacgcaagggcaaagaaactggctccgatgatctgaatgaaagtggtggaggtcggctctccgcaggtcagaaacaatctgtcaattcccttgcagatgccgaacacgccacttctcgagaaccgctacggggcttcgcgttgacaagagcgaagagaatacagcaaggtcgactgcataacaaacccctgaacgccaaaccttcgtctcccacacagagacagctttttttacgaaatacatcaattcgagatcggaagaagttgcggtttcgcgaatatatgaagaaaaaatatcaatctcgttcagcaaaactcttcgacaatgcttggtttgatacaaaggagattctggaccaagtgtaccgcgatatccggaaaattccccagaagagtttgaacaagaaggagatacttgtaccagaggagacccttgctctgttttctggtgtaacccgttataccctgaaagagaatatttggtacattccgctccacaatggatgtcgtgtgcacatcctacctgcaagtcagagcaagggattactccgtcgagtagttttgagtgccaccgaccatatcatggcgctggtggaagggcattttacccgtgcacagagcttacaagctatgggagatccactggttgatattcacaaaccaccggttccaatgtgcatttctcggggcgcgatgcagcgttcgaagctgcctgtaccgttggttcgtggaaattggcatttcggtcaaacatcggatagcagctcgaatttggacgagatcctgctacctcgtccggttatcgccaccgtgaaggagtttaacgagcacatcgaggatgtcacatctgcgagacaaccaacgctcgatgagaaggccatgtctctatcaaagcttccgcacctggtccgggttaaacgacatcttgaggcgctattcatggaaggaacatactccaattatatctcgactgcggctttaaataatgcactagaattcctttgtcggcatgagttccttcaaactgcccgatccttgttttcatgcacagagcatgtggctaccactgatacgtataacatcttgttgcgagctgctgcgcggcgtcaggatgtggctgtctttcgtcacttcctacgaatgatgcctcgattacacatgcgcccaaactcagaaacatggctcgcattgctcagcgccctagttgaccctagcgaaaaagcccaactcattgaacatatggttcagcgtggccacatgtccaacctttccaccatccacagcgcgctccaggagacaatccaagattcgcttctagtgcatttggacagtgggcaagatataggctcattcattggcctcatgaccaatacatggggtgctaattggttcagcccttccattattggccagatgttcagtgtgctcgctcgattgaagaagttcgattccatagaccggctcatggaaatctgcatcgacaacaaactcaccgttgacagttatccactcggccatatcgtgcaagcgctgggcgcgaatatccacgtcgctttgcagtataccctgcggttcttcgagcacccttcgttcgaggtaacctcacaaaattgggaggatttgtttttggctgccttcaggcaccgccagtacaacatctgtctagttctatggcgatattcttgcatgaaaagaaccgtgacctacaagatgaaacaggctgtcttaacttccttatgtcgcaatgcatcctttggtaaacccacgagactcaacaaagatttatggagttccgatgccggcaaggtcattatcggtatcgaccaaaaccatgaaagctacaggctcccagactctattcttgacgatataccttccgagttccgtcacaatcctattctctacctcatcggatggaagcccaggggtgaacagcgtgatctccaaattcgccttgccaatgccctcattaagcgtgacatgattcttggtgcaactcgctatgtcccccagcatccttccccgatcatgctggatgcagcgtccatcttagatcaggaatggcgtggtgtcccgcggcctctgacttggaagatgcaaaacgccattcaagttcccatcgtccgcaaagacaaagaccgagagcaagacaaaaacgaagaccaataatctcccaatcatcctcccctttgcatcctcattcttcgatccttctaccttttttgacgctagcgtgttgcatgaatatcccttctggcgggcttgttttggctggtgtttgttttctgtacgctagtctgcctactttcccgtcaccttgtatcgtatacttgtacattatttggaaatatagaatcatagagcttcaatgtccagaataacgccatctgagtatatattcattcaatcgtgagcgagtacattccctctttcaaatataaaacccctcaaaatctaagcaatgcatcgagatcattcataaaactattataggcagaaatagggtcttcaggaactctctcttcctccggtgaagcaaggcccccattgagaatttcagcttcgcgagccagcgcgttctcccacccaatccttgtctctgcaggcatcggagacagagaccgagactgggaccgagaagcaggtatgctgatccccttcacctccacacaatccgtatataaaagatcagactcaaagctcccgggagaatccagcactgacgaatacacatcccgccttctctcattttgtgcagtttggcagtgtgtaatgcctcctccaattccaggcgaatgtggggaagtggaagtagaagtagaagtagaagtagaagtgagggaaggtagtagccggcgcatctcggagtagaacgaatacatcgagctccaagggggtatatcgtgatcggtttcttctggcagatagctgttgagctggagttgaggttcgtgtttattacaagctttctggctgttgtggttgcggttggacaattgttgccgagtaagtctttccaacagttttgtaagtcttgctagtatctatatttttcttccttttaacatacctgtcaattgaatctcgcgggatgcaggcttgaccttctttgcggcagtgggtgcactgtttatatggtggggagatgtcacatcgctttttccgggtgtggcaggccacgcaggctatcttgccaggtcgacgaccttgcttatttgcttttgtaatccccgatgggccttggagtcgaattgtgcttaaatccattggagcttgaatatgaggattctaaaatatagacgtaggtgggctatatatggagaacgggtgctccacacttttatgatgatccagacttaccccaaaagccggcacaaccgtgttggacgttccaaattggggaaatccagaattggggaatggccaatttggggaaatcgacctcgggagaaattggggaaatctagaattggggaaatttccaattgtggcccatatcgtggcgattgacttcaagagttcaatgttacagcagcattcctaatatacaatttcgtgttatatcattccgtatgtgattctaatttcttctcatgacttattatgtatgagtcgtaaggtcaataactactactccgtactttggactatatcattctacgctaccttgctggatccacatagaataggagtacagacacatgtaaatggccagaaagatcgacacaggtcttagattgtttgcacaatcgcatttgaatcgcagttttcagccacggcgccgggagtgcccgtaaaggatagacaaccctggagatcatgactgatctaaaacggaatgctacacctgggaatgttcctcgtataccatgtatagattgagtcttgttcataacccaagagcatactgttggaacagtatattccgggctcggtgcatactacctactccgtagacacggcatgccgagaagcggtgcggggacattggcttttgcctcctttccgttttatcaacgtcatctatgatcttctaataataaactcatgatgattgcatattctgctacgtagtgcaaattaccctagagccacctctccaatctcaccgcatatgcttctccaagcacttcaagatttgaaacatttttgtacccaaagcgacctcgaaatgatttcagagcactttgaatagctctatcggtgctagctcactttcctctaactccaatatagtggatctgtcaagtgtgatgattcaagctatcaagctaggaagaacctgctcctctatggagtgcctttatttccggtgtatatatgtcagaccatcaacacgtcttttggacaacggaatggatatcaaccagtcggtgggccatggatccccgaattttgggtgagtcgagctgtcattggtccaaagctgcctccttgtgacgtccaatggttcaatactaatcccttgtaccatgtcgagatgataatatgcttcttgatcacggagccgatcctaatcgtcgatgtaatattgaattccacgccactctcctacgctgttgaacacgcttctttgccactcgtgagtctgctactcaatcgtggcggcgacattacagaagggcaggttttgcaccacgcagtttctcgcaactccgatgcagtggagctcccgaagctcctattactcgatcaacggtatcatgtatcaatgccatcggccttcttgggacatgaatttcttagtgggggaaactgttctgcacaaggcagtatttctttgcagattcgatgtcatccattcccttcctagggagggagtgaaccctaacttcaaagatgtcagaaactgaaccgtcatacaatgtgctgatgaaaatatttggaagaggatcccaggatgggcacaatactagttgaggcaaaggtcgacataggggacagcatggaaatacaagtacatatgtaggtattgcatccctcttacatgacatatcttcaatcaaaccatattagctattcggcacactgtttaggcaatttgtctttctatacaatataagttccacaaggacgccagctctcgtgagttatatatattctggtcatttcccattatcatgacatatcatgccagcacagcttgacagagcaacgagttaagttcaaaacgctgcttacaaccaaaaatcaaaccaatgaccccatgtttgcatgagaatgcccttcacacctatcagggagaccgggtactggtggtggaagaccatagggatcaacaagtgccgtccgaatcgcacccacaccttctttaaggtagagcacaagccggtaggccgagttgccgttcaagtaatatcggtggagctgtttgctacgcaggaagcccagccgctcgtacagtttgatcgcgccagtattggtgatttcggtttcgaggacgatctgcccaaacacatacaagtcagccacaataccctcgagaccaccctatttgcggaccaatagccacctccactgtgtagacctacctcatctgcatcccgctcgatcatagcatcgatagccatgcgcactagcttggttgcaattccccggccacggtactcttcgcgcacggccagcatggcgatataacctctcagcgggccgtcgcggtgtggctctagcttcgataccacgaccccgaccatctcgtccttatcgtccatcgcgaggaaacacaggtcaccccattggtataagaagtagcggtagacgtagatgctgtaaggttcagacagatctttggagatcagctggcgcattgcggcgacatactccttttcgcgcgaattttcatatcgcacgtagcgaagatcgggagcattgctcatcacagcgatgtcattgaagtgggctgatggttggagttgacggaggggacgggggtgggatgtgtccgagaggaaagttactcgcagccatgtgatgccgatccgcccgttcgcggacttatgcgcttccgtgtttttgtatccccttccttttcttcctgctttctttttcttcgaatttgtttgtcttgttcttgatattgatttccaaggcaaatcgcacccggtcctctccttctactccctccctcgcggttggttgctatgctccgtcgccgcacgggcaaggacggggtcccgccctctaacaaagatagcggtacagaaaccaaggaagaacagcttcgtgcggagtctgttgatccaaaagccacccagctagttatcaagccccggagtaaacgtcgcaatgggttcatctttatgttgggcgggatcttcggcatcttcatcgccttgtttttcgcaaaccagcatgaggtcataagcctggattcgctcatggacctaaatctcgattcatggattgatgctatcccacagggaattgtgagtgacgtgaaggaattctcggtacgtgcttttttcaagggctcttacctctacatctagttaccagttgactgacttccaaccgggttatagcaacatgaacgcgataccgtcagctatgattcgtttgccgttgggctacaacttcgcgccatgggcgtagaagccaaacaccctatcgtgatgatccctggagttatctcgaccggcttagagagctggggcacgggggaaacttcgcgacaatactttcgccgacgattatggggcagctggagcatgatgagagcgttagttatggataaagctgagtggaagaatcatgtcatgctcgatcgggaaacaggccttgacccgcctggcattaagctccgtgcggcgcaaggattcgatgccacggatttctttatcacagggtattggatatggaataaaatcttggagaacctggctaccattggctatgacccgactaatgcgtttacggctgcatacgactggcgactttcatatcccaaccttgaagttcgtgataaatatttcactcgactcaagtcctacatcgagaccgcagtgcacatacagggcgagaaggttacattggcatcgcacagcatgggatcacaggtggtgctgtatttcttcaagtgggtagagagcgaggaccacggaaagggcggcaaagactgggttaacaaacatattgactcgtgggtcaatatcagtggttgcatgctgggtgccgtcaagggattgactgccgttctgtccggagaaatgcgggatacagcgcagttgaacgcctttgctgtgtatggtttggagaagttcctatcgaaagaggaacgcgcggagatctttcgcgcgatgcccggtatctctagcatgctaccaaaaggcggcgaggctatatggggaaactcaacttgggcaccggatgaccaaccaggccagcccctgagctttggcaacctgatccatttccaggagaccaactcatctgtgacaaaacgtaatctcaccacgccagagagtcttcagtatctcctggaccagagcgaggattggtatcggaaccaggttctgggtagctactcgcacggcgtggcacatacaaaacgcgaggttgaagccaacgagaaggacccgcgcacatggctcaacccgctagagtcgcgcctgcccctcgccccagacatgaagatatactgcttttatggcgtggggaaacccacggagcgcagctacttctaccaggaagagaccgacccactggtcaaactcaaggtcagcatggacaccaccatcaccaacaacgagggcattgaccacggtgttttaatgggcgagggcgatggcactgtgaacctgcttagcacgggctacatgtgcgccaaaggctggcgcatgaagcgttataacccagccggcacagagatcaaggtattcgagatgcctcacgagcctgatcgcttctcgccccgcggtggtcccaacactggtacgtaattctttgcttccttacctacctgacctttccccacgatatgtaacaggcgactaatttcatataggggaccacgtggatatcctaggccgtgcctcactcaacgaccttcttctccgtgtcgctggcggcaaaggcgatttaatcgaagagactttcttctccaaaatccgcgagtatgcggatcgtgtacaaatctttgacgacgaatagatcaaatggggtcccttacgactgttctgaatatttgactcgcgttttgatacacttgatacacccacatatgtacctccttttagacatttgggattttttttttctcttctagacggatggggttttgcttacgatgcagcattcttgtacatttctttatgacaaaccccttatatgaacattttatattcctttccatggcaaaccctatttgttcaattatttaatactagaatacccaaacaaaccatgtcgacaagtccaaacatacgtaaatctaccctctcgtatcacggataagcccggatacggtttctttcctagccctaaaaatagggacttatgcaaggccattagctgctacttgtagcaactgatcccgtgtgatcgacagagttattggcccgcatgagaagcaagggcataacgtcccgttcttatcacactggcggggttgccggttctcctcacctcgaacctgaaagaattcggaagctaagttggaggatgctgtatacacatactacactagttcctacaagatgcgtttacaataatagaacccagaaatgtaaataatgtacaatgattcattcatacgctagtgattaaaaataatgctagcaatagttacccaacaggatctcaccgcgcccagaagtaatgataagaggtatgcacacgacccaatccgggtcgtgtagagggtgtcacggaaagcgtagatgtaataggttgtcggatcaggttcatcctcgatagccaaaggcaaagagaatgggtgaagctcgagagcaggtggcctccgtcaaaagtaccaagccctagctgccatgaaactcgagctctgaaaacaagaccccagctttcagtattccccttctttcctttcctcggatctctccgtgtcgaatccacacgggaagaatccacacaatatcgacgccgatcaatcacctgccaggcggcgtggacacagagggaagatcgagacgatcttttcaaaaacccccatgtgccgatgcaaaatgtcgtaaaacagccaattccagaaccccttctagtgcacatcaagtgtgcagcaaaagtgccgaaacttttcatctctccaaaaaaaaaccagtttcttaagttcccaggcgcctatgatgagcgagcgacacgaagtaaaaatatttgttcatctgaacgagccgaaagcaaaaaaaaaggtggctcgcccatttcataaagtcgtagcgaaagacatgggtcagaaaaatagaggggatcgcccgagggcgtccgagaatgtgtacaagggaaggttgacagcggtggcggtgcgagaaattggcgaatgcgggcaggtgaacatggcccggtcccttccgccaccagtattaatattatagacggagttgccagcccaaaaggtggggtagcgaggcatgtacagccagaaggtgaagagtaccttcagctcggggcggaagtaccgcgcgaaccggaggttttattaaaaccttaaggtgttgaagattgctcgatgcagataatgttcccaaacattgtcgtcaaacataacgccgattcaaaagtagtagatgcaagaatggactgcgccgagtgtcatgtgcaagtggagctcaaggattagcgcccggcctcaatatcgtgatttgaggtgagtgtttcgctttcccagttgtaatgatcgtccacggggctcaaagaacccgatgaaacagacgatgaagagcccacggtccactcgtcactgtccaagttgaggtcgccatccaggctggcaagatcatacccggactcgcgggaagagtcaccgacctcaacatagtcgtagtcccagcggaacatcttatcggcctgaactcgaggcaggaatcgagtcttggcatagtagaaggcaaccgtggcaagcagaccaccgcagaccagatcaactgcatagtgatgcgaaagatacatggtagcccaccacatccacagggtgtatgtgacccagaggggcttcaaccgcgggaagacgtggctcatgaagagtgctgccagtgtggaatcggcagcatgcagcgaagggaatgcaccaaaaacaacaggggactgcttgaagcccgaagtgtagagatcgatacccagcagcttgtcaatgcgagcaagaccagccggatttccctgcatcgagtaatcggctggggccaaaccgtacagattttcataccagggtggcgaacaggggaaagccagctgaatgaagacagcggtcatgctaatgtatccgagagtccgggcgtacagaggggtagttcccggggggccgaagaagaaaaggatgagtgaaacgacgaatggcgctccgtaatggcagagtccgtaaggaatccatgccaaaatgtcaagcaccacattttggtgggcagatagaatgttactgatgttggcaccgtacaggatgttttccatggctggcaacactcggacccaaattgcgggccgccaatcgcttggaacgaatctagagaaacatgttagcgatgttgaattcccagcacattgctgctcacgccacagggccatggcaagcgcatatgctgcaggaaacacgagagaaagcaaaacttactggcaaccatagaagaagataagccacccagcaacgggaaggaaaggcaagaagaattgccgggtgattggcatcaggagggagcacaagagtccagtggcgatcgcagtctttccaagtggaccaggagattggatgattgtcaaggagaaaatgccgataatgaggagcaacaagtattggaagtcatacaaggtccatcggtgtgcttgtaaggatctgagggtgtcggcgggcgagaaggaggtttgcaacctcgatatggacgaggcgggcgaaaggcggcttcggagtttggaccggagcttgcgacgcatgcgatgtggtaccaggagctggaatgaacgccatggcacttggatttgaagctttccaaagtgatgctgtgtgcgatctttccatgacggataggaggcgctcatgttcgcggcgactctcctccaggagggtccggatcacttttggaaaaggggtggttgagacttcaaggaatgccgcgggacgagacagagggaagtcgcgtaacggaaggaggtttatcgttgggaagagagactccagaaaaggtgagttgggcgcgaataggaaggcgaaggatcgaggggcgtgagtcccagggaaactcaggaggtcacgttgacaagggttgggatgcaaggaggaaacgcaaccgagagaacccaggataaacagcactcgagaagaccaaggagaccactttagaccctgaagcggagatattaaagaattaaagaggaaagatgggagagaaggaagggaaagaaaagaactggatctcacgaagccttgtattggtattaccagcagctaagttttgtgtaattttaaatacatgtgtatagtgctactttccctctttcgtaggtctatggcgtcactatttggtttgggttttatttttttcaggtacgcaacctggaagtcggtctttctagcttgtcctattgcaatgctgaccggagctctcggcagtattcaataatacagtggacatccggtctgagggtttaactcggaagccacggaagccacggagatcacaattctgggcatatctcggactttgtaatgccaatggtccgatgttagtatgttcatgcagagactccgagactcccgagaacgtcatttatggcttccttatgttgtatatttatatcgtatatcgcatagttatatagatatagagaacatctccatatatcaacctcaatgacctaattctacttaattaacttcaatcgtggtatgtggtttgtaaattaccgagacgaaaatttcgcaaattttccatataagatccatcgccgagctctgattggctgttgctcccttgcccccatcgttgaggcccggtattgaaatccatccgacctctttaatttcgcttatgcacaacttgtaacatcttaccagttcaaccgtcgtcctggtgatcgaaccagctcgcctcatacgaaggcaatcggcccaacgcccaacgcctactttgtagatgctactccgtatacattataggcattagcattggcattggcattggcattgaggaaactcagccccggttatgcggttgagccacacacgatcagcactcaacagtcctaatttgactgacactattactctgtgctccgtagtgcggttttacatgggcccagcgtttagatgaggacgtgccttttctcaggggataccaacctcctgatttaaacagcaaccagtgaacttcgtactccgtacaaccacctctgctgtagaaagagattacactataaaagacgggacagctgattgaatatactttccacccctcgactccgcgtttcagtatcgcgcgcccgcagccaattaccccttgacttcataatctagcgtcaaagctccctggggattttacaataggcagtcgctattccggactccgtactccgtacaatgctccgtatcccgaggcttattattacaatatcttacttgactattgtattcatctttccatcgaatatgacagcgcacgttcgtattcgtatctggaggcggctgcctagagtgcccaggtggacggtcaggcttagaagtgatgtaaggctgatgtgtagagctgcgccacagatatgaagtcaacttgcagtatccccaacctaaggttttgttcgccttgctactaggccttatcgggatttggctgcaggtcaagaatgtaagatatgtgatcttacttgtaactcacagcttcgttgtcaaagatatgcaaatgccagagactcgatttgcgtgcaaaagcccttggcattacacaggattacatgtcacatttaatagctctgggattacgcccgtgcttatttgatacgaccgtttctgcgtcgtcgatcctaccaggctatcatactacgtccccgcaaacccgatgcggtcggtgggggaaaatgactacatacgccgtacatttgcgttttacctcatttcttacgacaaaataaataaattataaagagagagtttacattctcgtagccgtgtgctgtgccaagtataggctaccctgtaatatgtcaaggttgtacatgcgccgagctaattatacctcttttccgaggtcggctaagcgcttctctcgtcattcattgcatatgctgcggccacggagatgaaaaggataataatagaggcttgtgcattctgttcggcgcttagcttgagagtctgctgcctatataattattcgatatatatagtatccaccaccccacgcatcagactacaccgccgagcatacttctacaaatcttcaaagttcacagcataccttctcatttattgcgttcaatatgtcatccacagtttcaatttatgtcgccatcagcgccagcgagggcgtttacaaacactggggtgttttcatcgatgcaccccgagaagaagacaaaatgttcctccaggtggcaggttctgatggtcgattccgctatgagttggaaacaacagacgttcgacaatcggaaagactggtggagttgctttttctatatgatgtggacgtcaccgaaattaactccatccagacagtcgctagtcaagccaccgttcacaatgagattcggggctggaattgccaagactacgtacttgatcttcttgaggcactagaaaaagaagggatggtgaacggcaaggacgcaggctacaagaagcagaaaggtttacttcatgggaagcaggaagggctggcataggacgtgttctcctttctgatttgtgataatttgtgccctgttatccttattagatcagtctcttcagtcaaccatggcaaggcgcttgggaggtctgtggaaaggtaccaatgagtgtcaaaatgatgaatgccttgtccaaaggcatcaccatagcaaaagagctcagtggcctgagctttctggaactcaacatagcagcaacatgtgaagctcattaactctattctgatagttgatgacccctgtggtacgtcggtttttactctaatattaggacagacaatatcatggtgtaacaagatccctgtattaatttccgctaaattgttgctagaaatatgactgggagaaaaatagcaattgagtgactgaatcaatgtcctcattcaattttagttccgcagtttgcaaatcaagatgaaaaccctaacgccagccgatgtatcgttgtaaaccgagaaaaagaaagccgcccagcgccaacaccgtggaatagtaatgagtcttcgacgaccgctcagtcatgtctgtggtcttcatgactatcagccagcatctggaagcccttcaccagccccattgcagaaccagcggcgataccgccgactagtaccatttgtatacctccaatgacacccttgcggatatttcgacgaccgcgccagccactgacaaagcatgtctttacatagccgaagataaacagtgcaatgaccatggtagcaatggaccagcgcagggcgatgaaggcttcatggggtccgacgaaaaagtatggtatgagaggaataaatccaccgataaagtatcccatggcaattgtaaaggcgcaaacgatagcccgagagcccgagggctcgggcagagtgtggtggaagttcatgagaaaggatggaagcatgggagagtgagaaagatgatttttgagttgtgcaaccagttcagatggcaactcgtagggctcaaaaatgtcggagatggtgtcagatacagacgcgggatccgtcaaagtctgcgtctccgtttctttcaatgtagctttgtatgactccctaggaagatgtcagctgtcaaacctccaatagtttccctagtatattttcataggaggtaggctttgaggattcaggcagacttactcctcgcttttagcacctagatacccaccgagtcccatcgatatcgctcctgcgatgagctctgcgagtccaccgaaaacaacgattttggtatcgcccaacgcagagagtccagccgttagggcgaaaggcacagtcatgccgtcggaaagaccgatgatggcatcggacacggtgcgaccgtcgagaatacgagacgaccttcgctccgggtcattgtgacggtgtgtgttgttccctgcctcgatatccggtcgaagttgagcacgagggtccttttcatcttccgaagaagctctgcgatcgggaaggggcatataactcgacatggcgccgaatagggaactgattaacacggtgaggtcggagggattgaggactgaaatgaaaccttgcagtatcccttgaagaagacctgggaatgtttgtttaagtgaaagcgagggatacagcgcgattagagaaccagccagttagagcacgcgatgcaatcatgaggcttgccatgcttgcaacctcatatattgccagagaagtgatcagctcccaccgttgaccacagcctatcgagtgacacaggaagacaacgtgcttggcgttcccctcatggccagggcacgtgcaacgctgattcgaggaggttcggctttggagtggggccatgtgggaccgtgaaagggactcccgctgcttaacttggggtgtgggaccaatcaaaaactaccatttctaatccagacccctttcgtccatggactccgcacgggctcacgtgtgaatataaactatacccattgccagccctaagaggttacggtcggatattgcgagacattctgaggttagtggcaatatcgcttagacttcgcagtctggaagagttttcaccgcacgtgggctactgggcatggaatatcatctcaatctaaataaaacagggttgaaatgaagtccgatgatgttattcttgaatccacgaggaacattgatatccagctgagcatgactttcacctctgagccctctgactctgtggcaggtgatagtgtacgtagatgtagaagacataaggtagttgtaagcatatttcctttcttcacttcttcacttttcttttgcttcttcgcacgcttcacgaaggagctcacagtctcgcgttgaacaaaagcaaagatgattttctactggggcttcattattctcatggctttggccagtcttacatccactcatccaactgggaatactcaggtgtggggccagctgcgagagaacgtgagtggatcgcacagcatataaccccaaaggaccacatggcttacaagagcacttccagatcaagcatgttatctatctgactcttgaaaaccactcatttgacaacatcgctggctattgggacttccatccagaaattgacaatttgcgcaatctcaccttctgcaatgactacaccaaccccaattggacagtctatggggagccactagcaatctgcgctgaaccggatgcaaccgaggtgccgctcaaagacccggaccacaacttcggcggagtcacctacgaaatcttccgccagtggaacccgaccaaacaggatgtccctaaaatggcaggttttatcgagcgccaatcggagaagtacaatgctacccctggagattcggcattcgtgatcaaggccttgaaccggaagaagacagccactctggtggagctggcaagcaattttgccttttttgattcatatgtgggttcttcagtctacacttggctacgatatgtattattgcagaaaactgactgtcgactctaccttgcagttcgccgagcacccgggtcctactaaccctaatcgacaattcgcaacctcgggctcatcctgtggttttgtcgataacaccgatcagtccgctgggttctggaacaatgtgactgggactacttgtgcggtctcgatctttgaatcgctcagcaagaaaaatatcagctggaagaatgtgagaaaagtcttgttcctttgtactgacaactggctaaacatttctatgtagtactacgagaccgacattgtcgatggattcatgtataaagtcagtactttttgtactccaattgccagatcagttactaacgataatatcaagtgggtgcaagacaatgcaatggaccgtctcgtccatgcgacagagctgtatcatgatctagaagccggcactttgcctgaattctcctacctaaacccggagtgctgtacagttgactcaatgcaccctaccagcagtatggcagcaggggagcagatggtcaagcacttatatgatgccctgcgtcgctctaagtactgggacaatgcgttggttccgttatcctcatgttgagtgcggtaatactaaccctgaaatatagtgttttgatcatcaattttgatgagcacggtggattcgctgaccatgtccccacgccagtcaatgtgcctcaacccgaagacggcatcatcttcaatggcacgtcatcaaaccacaattttacgtatgactttacacgtctaggagtccggtatgcattctcatcccaatttcagctttaccgtatgaatattcggcttaccttctcatcatagtgtccctgccttcataatctcaccttgggtgcccgccaaccttctcatccacgatcaaggcaccatgtatgccgacgattcggcctacacccacagctcaatcctacattttttgcaggagttgtgggggcttgagggcttaaacaacagagttcagtgggccaagacattcgagacggcttttaccaacaagcggcgagacgatacgcccaagacgttggttaaaccgacctggtatggtggtagtgggcagccagaaccggaaccgttcttctttttgaaccaggatgagagctactatgcacgtcgcaaggcccaggctaaggcataatggatgaaagtggagagttgctatattgatagtgcaactacggtggaataccgagcaaatccttgagatttcgggctcgatgcgggaatctctcgttttatgatatcaggtagtctaatggagtggaacgatacctacccagtacacttattcacagggtcatgataatgcaatccagtcgattgacaccgactcaacgcttaaattgtcaacatgtagtacactgaacaacttaaaccagaggcgatctcaaagcaaagtcgagttgagagccccgtattgatttaggaagcataatctggagtatatggcgcatagtgatcgcaaatttgaatggaaagatcgtatatcaggactggcattgaccgagacgatagaaagcccagaactactatcactagtactataccagcatcgacatgtctctacaatttagatgacatacataagcggcggggcaccaagagggtggatccactctgatcttcgatcgggtaactttttgtggaaaggtggccgtttcagccttgaaagtggtcatattagggcatcaattaaataacttcttagattctcggtgtagatccacgagcggataagtgttcattgcgaaacctcattgcgaaacttggtgcagaatgaagcagtccggtgaaccagaaacataaccaagaaaatcatgcaggtccaacatatcacttgcgtttctcagcaaccttctgctccgatgaagacgagccagccatatcccacagtcggcttttgtaagcggggaaggaagtgtggttccacatgttgaataggacactatggggaaaatatcgggtcagtcgtcacgcacaagcaagggcgggaaaaataacacagcaagacgaaacgcacctctgggtctggtccttgtaggcctcatctttgacctcccttacttgcaccttcatgccgtccttggtgaaagctatattcttgcgctccatcttttcgcgcgtatttttgcctacatcctgcatgatgctgtagacgacaaatccgaccgcggcgatgatgccaacaaagacgaggagcaggatgaggggaatgatattgcgggcgcccatggtggggtttttttatcggtggtaccggagggtagtccagggaatttttggaagaaaaacgaggcgataggtggaattaaaagatgagagcgggcgggggaaaaaacaataggctagtatatgccaagaacgggtttcttgtcgaaaatagttgcagccttgggtctttttctgggcactgttgctgcctggagtggatctggatgtttgttgcacaagaatgctatttgaattccagcgggacaaggctcaatatgagagtcagggggttgagaccttgcaaggttgtttcaacggttggagtacacaatgacgtctggtttgaggggaaatggcacgcgtcgtggctgtgtcagattgcgtggctttcccgttagccacttcagttatttttatcgggaggctccggcccggtcccgggggcatttttgaggttaattttaggctggcatctctaactagatgcactccgtgcggagtacatacacttggacttagtctactttgatgggacgggtttgtacttgtcactagtatgaagatcacctctatcccgacatgaactaaagcaccccactacctaaaacaggatgatcgatctcgatctcatttgcgtcatcatgatagaactccaaactcaacgtaactaagcggtgaattctctatctggggaagctcatttcttcgagaaatctgtctggatgaaggtcgggacatttctctacaaattctagttcatacacctagcagcttagctaaatccgacacgatggccgacatccctttcattccgatcttccccatctgcttccaatgcggcactgatcagaacccatgtcactgtaaagtggttggcccgacactcggtaagttcggttccttatgcagtgtgaatggctgaaaaatgaacccatgcctgacgaaatggacagggtttttcactaccgttgtgtcagcggtaagtaaatatagtatcttctcgagcaataacataaagactctcttgcttgaatccaggctcatgacaacccttttctaggtcttctgctatccactatcgatcttttgtggctgcggcttcactcaaactggaaaggagtatgtcccgctgtcctgctacttcttgatatctagactaacaaatagtagtatgctgggataccctgtcaagttaaatcagaagatcagtaatgccattccattctgatattgcgagctaggcgcttgagatatacttgagggcctttttattgtaccttaaccttaacctttaatcattatctctcttttttccccatgcgtttaataaagcaaagtacttccgcccatctttcaagaaattgtaatttcttcgtagagtcgcaggggataaatgctcgagagcttctggtgacattgcgtttggatattaaaacctaaactagcatatactgtaagaaagagaacccaatgcgccaaattgaacacccgtctttctccatgacatgtattcccaagactacttaggtggaagtcttgttaggagcaggcagataacccgcagagtattcttcggcttcatcatagtcttgcaaatccagtcttttcaaggctccctcttccaacagatccgccacactagtcagagccaaaagctgggatccaaacccaggctgctcaaaccaaggcgaaatgggccccaaaaggacatcaaattccttggtcacctggtagacatggtagttgtacgggaagctgctgttggttggcgcgaacagattggatggtggtagggatcgctcgatatatggagctccaagaggtgccaagaactttccaaattcagacccgaatctatcaagcttctggcccacgcggagtgtaaaattgccaagaatagacgcattcgtggatgtttgggcaaatccatcgctgtctggatagatccagtaagccgtggggtcggaagcgttcacggtccatttctccaggaactcaattgggcagagctcgccgaagcgggcgtatgtcttgagctcattggagagagggaaatatctggggaggactttcggaccaagtcgtgggtcaccacaaacagcagtagagttcacgtgggtcactcctttacaggggtcggggtaacatctttttgggtaatccggctcctaagaagtatgagcatttgaaacttatatggcctggtaccataaaaggggtcttgggaccactgaccttgtttgtagcgtgcctgttaggagtgatgaaagaagaagcttgtgctagagcaaccgaaagaagcacggatatagttgagagatgcatcatgaattatcctgataatttctctctgtgggttcaccgaagaaaggaaacagagccattaatatactagaacggccaacggagcattgaccttccaatctcgcgatctacagcgctatccaaattctgcgcctaagctatgcaagcagatgggtctgtcctacagtttttctcccgggggttagccacgcgccttttcgagctcgcttcattccaatcggcggcatttttccccttgctactccaccctattcttacccgatttgtaggtcgtactctgtactctgtacaacatacaaggtcgaatggaatagcctacaatgtggtgaaggtttcgcactctccatgcctcgcaactcatccgacccggaaagatcacagatattctcagagtaccgcagagtacataatttattgacaatatgagatcggaatgccagatccaatcgcttatttgagagcaaaattcaattatgctgagagttttactctatggaccattcaaagagccctagaaatatgtggcgtttgaaaaagccagctgtgttagctcttaatccacaaaaatgcagatgcgcatagcttcctatttaggaaaatgagaagcaactgtacccgtacggaagcactccatacctgcaggcgcattaatttgctcaatactcttcccaacatctagcaagaattattgtgcacgttatcattacaattcatttgattgttattcccctgtcagctagcattggttcggtttatttcacttggttatttctatttgatttcaaaccgggcgaataaggagctaaaggaaaaagtaatataagacaatcaatagttcgtgatctacgtgcatgagcatgaatctattcggccatgagattcgagatccacaccttggcttgcaaaagacgattatttccttcacaggctgaaatctgagatcgaggactccgtacaaagtagaacttagccaataactgcatcatacagagtggatccaacagtagtcgcgtgaccaggtacaattcagggacagaacactcctaatcgttaggagagatggggaattatctatcatcaaccttgcataggcaactggatgtgtcgaattgacgcatcagtgaccatattggttagcattaagctgcaagcagatgtccaaacttgtacgagtagtactccgtaaaggctgaatctatttagccaaaggattagacccgctacagggccacttattttctcccctgatgtaggcaggtgggctgcgttaattaaagatcggaaagatcatagaactatcgatcgagactactccgcacaaaatacagttattcctatgctaagcgatattgcttggtagtacctacaaaacccccttccatttcattacaacaatcgacatcttccctcgtcccttgtttgggcttgccggagcccagtctttgaatgtaccaacctcctcaaagttgttcttctcaaataccttcatgctccctatgttcccaacaaaaaagctgcctctaagaagatgaaggttcatccgaggaatagcccagtcttgaatgacagttctaacagcaacactcatgattcctcggctgtgttgagtaggagaaagatagtctgttaatattattagcaattgacctcgagtctcactaaggtgcccatacatacatcctataccccagacgatatccttgtgccccacaggcaaatcattattctgatcctgtgccagcacaaactccgagctattgggttgcagctcatagaaagcataccgcatcagtgaaatgtctccgatcaagacatcttgaagcggagcgcgggtcgcagggtctctttctgttactttgcggatacaaatgaaagggcatttatcaaaaaactccagctcctctggggaatttgaaccgtcgccctgctgactttgcgtttcgaattctctttgcagagtagacaggacaccctcgttttctgctactttcgtcttgacccagtctatgccgtgctcaggcagaaaagggtagggtggcccctgtagccaggagtacacccgtgaatcattgaggatttcggtcattgcagcagatgcctcctcgatctggtattcacggtgtggagtgatgatgatgtttgtacatggtgctgggagttggagatagggctctttagtgagcggattaaagtggacaaccattttgccaaaagccaacctaagtgcaaggcttccaagtggaacaactgcacgctttatgtatgattgtatttcaactgcacaaggctcgaagtcttcgtgagtcactcggcaaatgagagctaaccaattgtggcaacactacagttagcttgatattacccctatatataattttttcctccaacttcttggctaattactgactattgattctttgccgttcataaagtccgagttcgaaggcagcttattcagaccttctatcctcggacctgacaatgagaacatcccgcaggaactgcatattaggaatccgaatacaagcagcccagaatagaacccggcgatgcaagtatcgctagctagctggaatcttgaggcagctaaagtatacaatatctggatgcatttgtatgtggatcatgtcaatttgacagtccgctgagaaggcaagaaaaacgcttcgttatgttctattatacaaggaccccaccaagtgccaccaccatctcgaaatggcattaaccttccggggtatatgaatgttaatttaccggcactcgactggtcaattgctccagacgtcctgccaaagctcgatgtttgcgcatgacctcctcccattcataggccatatcttcggtatcttcctccccgcctagctcggtcaaagtcatgccaaagtcaccgcctagccgaccaagacttgcggcacagtaaagaagctgggtgagaagactttcccttgaactccgatcgcggacgttggggagatatgagcgcattgtatccgtgagcaattgcacgagatgcattgggaaagtagccaaagctggggggagacgttgcaagggatcatctgagtgtgctggctttgacttggccttggagtgaccgtctgcacctcgtaaacctgagatggcaaactcggattcggattgctcggagttaaaaatatttttgtataacgagacaattgcaaagctctgctcacggaagatctcaatgtatctttttaagtagcggtcggtctgctgaccaccggaccacgagttcgtgtctgatttgtccttgccagcgagtctccgttgggtttcttggtctgcgagctcgcgaaggggatccagggcttcaagcgtcgataccaaatgcgctagtctacagaccaggaagatagcaccaagagcgccttctcctgtcccgactgccccatcactctgaatcatatctagatccggggccactcgccgcagccaacccacagttcggataccagctgctagccgtaggttctgggttcggagccccgtaatcagattactggtcatgtccttcatagcatcctccgcctgggatgcaacgtcttgaatcaatggtgattcggggtataatgtttgtagtcgcttgatatgtgcatgcaggtcaagtgcagaggagtaggttgtagaggagacaccggtaccggagttgactgaggccgcggagacggctttggacagcagacttggtagttccaagatatctgacaatcgatcgacgttgcgagagagctgcatcgctttcttccgtcgttctagggcggcattgtctgtgattttactgtatttggtggagaacccaacggcctcctcgtcgagtttggggatagcatcgcgtagctgttgcgcctcacgggtcaactgtgggacagatgtacatagtgtggacaaattatcggcagaggtgacaaatgcccggtgcgaacggttcgatagggcttgaagggacagaagggtcgagtgggaggattgggcgagcgatgggggttctgtggtctggagagcttcgagcgacaaggttgagaggcgagtgagatatttgtctgtagttacatcgtgcgatttggttgcatctagatgtggagcgagtagctccagcaaatcggccatggcgagttgatgctattcgtaagatgcgtaaaagaggagcgctgaacggtccacggatcacccgcccgttggcccgtgcgggtcagttgtatccccgactggaatgaactttttctttgctttttcgatcctctctctctctgttttagatagacagatagttaggtcatcgttgttctcttctttccttctctttttccatcgttgtccttgtggctgcaaataggatacttctactagcccctcccccgcattcgaaacccattacgttccccatgacccttccaccatggggaagccacgggtaagtctctatttctgagtgattgacatatgtcttggcttaaactgacagtttcctacgtacagatgatcattttagtgcgccatgcacagtcagaaggcaacaaaaaccgcgatattcatcaaactattccagaccaccgtgtgaagctcactgctgaaggatatcgacaagccgatgatgcaggccatcgactacgtgaccttctccaacccgacgatacacttcacttctttacttccccatatcggcggacaagagagactaccgagggaattattgaatccctaacctctgatacacccgctccttcacctttccggaaagacacaatcaaggtttatgaagaacctcggctgcgggaacaagattttggtaatttccagccatgttccacggagatggagcgcatgtggatggagcgggcagattacggtcatttcttctaccggattcccaatggtgaatccgcagcagatgcctatgatcgagttagtgggtttaacgagtccctctggcgccagtttggcgaggatgactttgccagtgtctgtgttcttgttacgcacggcctcatggcacgagtatttctcatgaagtggtatcattggagtgtggaatattttgaggaccttcgcaacatcaatcattgcgagttcctagtattgaccctcaatcccgaaaacgggaaatacacactacagaacaagcttcgtacctggtcagatcttcgaaaagaccgagatcgtgaaaatgcatcgaaaggtcaggtccctgcgcccatcccacctctcggtcacacagataataccccaactcggcgcaagtggggaggctgccccgacggctgtaatcacggcatgactacagagggaagacaatcgttgcgagtgaatctattgaattccagctatgcccaaccaaagcatgccgatgaccatgtaggcggctttggctccaaacttcacaagtctatatccatcgacgaggtggtatcgttctcagaagacaatttcgcccaggatgataccagtcgaaaccccagcgttcatcgcgtctccaatccgcagcatacacttcgcgacaatgacaacagagacaccacaaagcagtacgattcaggctccgaagcccgaccaaacgtgaattcattgcctccaaaacgtccaaacttgcacggactgaaccgaaatagccaagaccatacacccacatcatctgcatcatcatcggcgcacctaaagtatgcccttctccaccttggcggccgtgacggtggaggctccatgagcggagcgaacagcctcgccccatccgatgatgaaagtgacgatcatgctcaccgtcgcgttgtaccaacttctcccggcatcgccactggcaatttgtcccatatgaaccagcaaaatttcgaattcccgtccaacgagcagactcaacagcgtggtccctctcaggagttcgaagatgacggcgatgacgaaatgagcggcaatgccaccgagaaatcgaagaaacctcgtctgcaccatccccatcaataccatcactattatcaccaccatgtttcttcttccaccgaccaacccgagcaccgcatggccaatatcctcggcgacggagacgagtcatccaactcggaatcacaggcgcgaagaccagaaagttcttcatcggattcctcaactcatatccacatcgaggaattatcattagaagagcagcaaaagcaaaatcaaagtatagaagggagcgtttactaaatctgttccagttgctttcgtcgatgccttggctgcacttctccttatttcctgtctctttcttttctacatctacgcttacgacccgtgacgactgtctggattaccctctagtacaactgcatttgacctacatcttacttcagaatgatggcccttttcggcgttaaatcaatattaaattccgtcataaaagtatatattacgagacctgactcagaattcattaaatgtcccaaaagagcctaagaggttgccaaatctagcagtggttatagagtagtggaggctcaccgttcaaacagaaggtacgagggggaaatccatacgagtccgagaacaaaacaccaaagtttggtagtcctgacaaagacaatattttgccgctaattagtgaaacatctaaggaactgagcattgacagccatagccacggacgcccgtagccaggtcaacgcatgaccaatggaagcgggacggccccagctcgctggcagtgccgaatggcaaagagcagaaaaattcagctatactacagttgtcaaatcgcgggaactcactagactctcaaaatgacatcagacaggagatgtatcaagggtaccgaaatcccaagaccaatcgtatgccatctgtgtcacaagcgaggggagagagaggtgggtgggaatgatgggatacatcatgcagcttagaaggctcggaaaaaatccttgaattgttgatctcattgattggagaagaacggctcggtagagcaagataaaaacaaatcgaaggaatcgaaagaagaaaaaaaaaaaaaaaaaggaatgaaaattgaaaatttgagttgagaagtgaagaaacacgattaacgtcggggcactgcacgtagcgtggcgaatgggaataatgtaccgaaatgaaatggaagtgaaaaagaagaaaaaagcactctataggtaatcaccgcgagacacaaatgccaagcataaaacaaaaggaccaaggatatgaaccgaagtcgtgggtaataaacaaagaagtcagattttggggattcgtgatagtcgtgactgcggccccggcaacctttggagggaaaaatgaaagacccaacaatgaggttagaagtaagactcaatgaaatcaaagtgataccaatataacaagttgagtcaatattctgcattgtgggcttgccgggagcatgccaatgtccgctgtgggagcgtttttcctcttttttttccattttcgagtttttttttcgctttgccaaacgagaaccagcggacgcagaacagaaatactttttgggacgcggtaggccaagtgctcagaagtaagtgaaagttgaacgaagcaaaaggtcgaaaggcgcaagattgaaaacaattcaagcaaaagaagaaacggtatcggaataaatcccatgcgagtcgcccaaactaacggtgaaagaagtctagagttgtagcaagaaggaattatgcggcgagacttgtgatcttgagccgtcgacacagtctgttccatccgaggtcgtgggcagaacttgccaagtatcaccaactaggttgcaatcatcggctgatgcatagagggaaatgcattgttgcacatgtagtgctcgagatgcttggcacagtaggtgcagcagcacgacgaaccatgacccgtccagagactctgtgcgaatggcaaaccgtacgccggagtgtgatgataggacggaggctgggagcgaggtgcagggtgaaccatgtactgtgagggtgcgttccagccccgcgagtagggcggaggcggaggcgggttagcgtaaccccaaggaccaaccgagtagtagtcgggggttgtgggcccgctggaaagggcagagggaggcgagtactcggacgcggtcgggttgagccacgagttctcaatttgggagctccgctggtactgcggcgggatagggccttcgggggacataaggggcttgctaatagcctggccgcgggccacgttggtctcgagaggtgccagagtctggcgagagtcctgagtccgagctgttgccttgacccgccaggtgtcccagtgcgcgcgccacgaggcgaaaccatcctgcttgtcgtagatgcggtcgtgaatcttccagtcaaaggcaaaaagccattccaattccatgtggttcaactcagcaacggggatgttgctaacctcagcccaggatttgttctggaaggtattgtcatcaaggaacttgctgcccaacagaagagccacagtcaacatgcggtagacttggctactgtctgccttggtgaaggcgcgtttggctgacaccaggcgcatacggctggccaggtagaaaagaccgagcaggatggtagaacttgggaggcgtgtcgaggacaaaatctgaaagacgtatttccgaaactgggggggaaccgaagatcctgggtagatgcttcgcacgaggtcaatatctgcaatggtgatgttggtctcgaacaaatcatacattccctgagccatttctgccacaaagtcggacatgcgatccatctcataatccaggtgagctgcgacacctccagttgctttctcctccttgcggggttgttcgagctgctgttgcatcggggcggcttcctgtcgacggtagtgaggcggcattgtagcatccatggggggaagctggacgttgctgcggattgagggcaatccagtgccaaccatggggttgaacatgggctgctggttcattatgtgatgatcgcgagcagtgttcatcggatgggcggactggtggagattcatcgaagtgggtttggcgtaacacagagactgcgagtattgttcgatgaattcattgccgctttggtggtagcgaggagggaatcctgcgtgaccaactgggtagaatgatgggtcttccatacgaccaccgttgacatggggaggcgtaggcaggccatggtggcctgggacgaagaaggacggcatcttgagagggggaagggcggttaccagttcaggacggggagctagacgtattctgttgccagggaagatgatgaatcagcataaaaggcctccggggtaggcaaaagcctgatggaccgagagacaagagttaaagaaacaaggagacgaaccgtctactccaccagatcctgatcctgggggggaggaagaggagaagagcggtgctcggcgagcggatcgctctgtcgtattcctagggggcagtctctagttgaatgacatcgaggtgcgttcaatgatccaacagacaaatgacaagtaaatgggaattggaaggagtgtggtgaacggtgaacaatgacacagtcctcgcttgaagtgcctcagtgacgcagcttgtgggggagggtggtagatcacaatccagtcaattcgaagggctttgagaggcgaataaccaggtcgaagcgaagcggaagagcccacgtagaattgtgaaccgaacgcgctgggagaaggaagagcaccggtggaagaaaactaaatttcccacgcgtagacgcaaacctcacagaatgaggtgatcaacgacacttagtgaaaagctcgttgacacgggagaagattgatacaaaaaacggggttgagaaggaggatgaagagaagaaaagttgtataggggcgttgtgggaaaaggccgttgggttgccccggtaattttacatgtatttggtatacagggaaggagtcactcggcccacatatggaaattctaaatttaaaaagctcaattgctgtttcacacatcgtgtctctgctagtatcaggtaaattaggccacctacaaagtatgaatcatgatgcttattggatgtgaatttaacaagatcgtcatttcttattagttttctagactatcccgattttttggattttttactataaaaatctatcctgcgtttcctataagttgaaaacgtgcacagtgcatagtgcaggtattatcatgtaattgtattgtaaggctgttaaagtaaagaaaaaggccctagacccttcaggcaaatccggtgatgcaacgtccgtgtcactggttctcgctggttctgactggtacggagttttgtattgagctttggcagaaaaaaatgaaattcgggcttagtaagctcagtatattccgtcgccttggttggaattcgttttcaagaaatttgaatagtaaagagtaaatactaaatatccccttattaaatcactagcattatcatatctataaaaaaacatctgaacatcaaatgccgcatccctccgtttctgaatctacaaaacccctacgtagtgctacctacggatgtgttcatccggactctgccaacaaaccaactccaattatgtacaactacggagtacaagtaggcactatagtcaaactaacaaaccttacagctgtcgccgggtcattctatccctcgatatgtaatcacacggctcattattccgtacacctaagcaagggcaaccgacaccatgcatctgacaaacactccatctactccgtactccgtacataactagcactccccctacctcttctgggctttgacatgtcagacacagtctaactggccacctagggaggaaccggggctctgactcaccgtggacaactccgccttcagcgaagacctgggtgttgatctctgcagtctgcatcctaatacggagtagcgtcatgctgcatgggcaaatggatatgttggaggtactccgtacatgtacttactcttggaggcaaaacagtgtcttggcaggtatttatctgaggctgacagcccgctatatttatgtgcctatctgcttaaaaggcgcatacatcttctgcgtgccaataaaaagccccatatatatggaactcatttctccaagaggggtctagaaatacattattaatccttaaatacttaaaatacttaactataacaggcatcgaaaattgcgcgtattaatgaattccagaaagaaaaaaggaagcccctcggacctcgtgccttgccatgctgatgcagttcctccgattctttcaaggtaccatatagtacatgcctatatacaccttgcaccacatgtgatggttctaaccaacatagacaataaatacatcaataaatggacctacagaaaaaaaggaaaaggaaaaaaacaggataacaggaccaacgatgcccgaccggctacattcggcagcttttcccctagaataaaacatctccatatttcctggctgcactatatgattccatttcgccgtaatttaaggaaaaaatcggaaaactcaagcacccctcctttctcctcagggcgggggaggcaaataagagggcacaagtacgtaggtacgcatgttgtacggagtaactataaggttgatagttaatcaatgatctcgaaagcactgtcacatttgtcatgatggtatgattcttcgcaggttgtttcttacaatttctgttttgggttccttatatatgccggtattgtatatggctgaccggtctattctatgctttggtgagcgtttgggcttttatgtcaggtgcctaggtcatgcatgcctggataaaaagaacaatttactacactgcctctgaatgggctgtgacaagcctgccaatgaagaaaacactgaaaggcaaccaattagaaaggcgtatacaaaggccttttgagcaaaagcagaggaatatcgttaatattcaaagcatgttgcaaaacaaagcttcggactttgaaagctcaatcgaccttctaaaggcaaaccataagctttactagatatgttatataactctagactcggtccttaggaaaatgccaggatccattattatccatatcaaaaatatacagaaaagatatgtactcaaaggaaaagtgcgacagcagcgataacaccaagagcagacaaggcgccggaaacagtcgaggacgaagcacggttgaacataggtgatgcacttgctgagctgctgctttctgtagtagaacccgaacccgtgcttgcacctgcgcctgtgcctgtggcagcagtaggagaagaggccgcggcgggggaaaccttggctgtggctgagtggattccggcggagattgaaggtgtggctgagctgatgcgtgtgagtgtgatgccgggcagattagaggggtggccggtattgctaccagcggagatatcagagccagagccagagccagagccagagccggtcgaatcttcatcttcaccttcaccttggttcgccgatactccggaaccaggtccactttcaccaacgcgagaaacactagtctcactgatcacacctccctcggtagtagcggtgccagtgacagtgacaatagagtaatcggtcgaaatccttgtctcactactaacaacagcagtcgccgtctgcacaggaacagtcgatgtatacactgcgccagatgccgtggtggtcacagcggtgttgattgggaccaaagtggtaccggcaacgatagtctcagtagtgacgtgtgttgtctggtcgcgggctgggcagtcagtcactgtttccgggcattgggttagagtgacagttctggttgagaggattgttgagattgtgtagtcattgtcactgccagataggctagtagggctggattcctcggaagtagcggtgcctgtgatggtgacaatagagtatgcggttgaagtctttgtgtcactgctaagaacagcagttgccgtctgtacaggaacagtcgatgtatgcactgcaccaggtgtcgtggtggccacggcggtgttgatcgggaccgaggtggtaccggcaacgatggtctctgtcgtgacgtgtgttgtctggtcacgggctgggcagtcagtcactgtctccgggcattgggttagagtgacagttctggttgagaggattgttgagattgtgtagtcattgccactgccagatgggccggtagggctagatccatcggtggtggtcgttgcatctccaacagggcagacggtggtcgagacgatgatagtctcggttgtaatgtgagttgttttgtcagtggctgggcagttggtgatagttgagggacaggctgtgatagtcgcagtgcgagtggtgaagacagtagaggttgtcatatccggcgtagaagtttcagctggggaagagctagtgggcttcacagatgcaacagttgtcggcgccgtggactctgaaaattctggtgttcccggtgtcgaggctgaagactcgatgacactgctggaagcggggtttacaggtccggtgatagtggttgttgaatgtggcgtaggagttccagctggggaagagctagctggcttcacggaggcagctgttgtcggtgcggtggactgggaaaatgccggtgctccaggggttgaggctgagggcttgatggcaccactagaagcagtgataggtgttgtcaaggtgatagggcctacagtgctacttggtgatactgaggagagcgatgaagatcccgatccctcggagctagaatggccagatggggagacagaagaggcgagcggagtgctggtagccacaggcgagcccgatggggtcttggtagggaccgagacgctggtcgaggtgaatgaaccacatctcttctcgaacgagaagttgttcacatccactgttgcgcccaatatcgtggcaccagggcaactaattaggatgagcatgtcggcttccgagctaacagccgtccattgcttggtgatagtctgccaggaaccggctgtaagagtgctaacgccgacatttgcaccattgagtacaagatccacggtacaagagccagctgtcaggcggaaatcgaaagagacagagtaagtctcttccgcaacggcgccagtaacggtctggatcaacagtgcctgcgattggatagcttcggcactcagatgcctatcacaaaatatgagtcagttcatttatactctgcaaggaactttggtctgtatgtatgattaggtaggtacgaacaagtatccatcgacaacagcaccggccgtgggcgggagaacagtccacacactgtcatcgagatcgatagtctcgaaagccacatcctcaatcaagttttcagaagcacaacccaagagcggagctaaagagggaatagtttgactaggcgcggtgatagtgagtgcaacagctggaagaacgtggacaagccacatcaagcagctttggaccatcatttttgtatagaatctagccaatgtaaacgaatggactggtgactaatcaccacaaaggagcaaaagaatgtttagatgagcaagtgagcgagtaagtgaatgagaggatatcgtgggcttttagcccccggatggctacatagtaatctccccaggtctgtggcgttactgctccacttggaaaacatggcaatttgaagcgaggattgtctcgctcaagacaaggcaattggttcctgcatgaattagactgacttgattaagggaccaggcacacatcaaatgagtaactagaatcgtgttattcttccacttagggcttgggaaaccttgtaaaatgattaccggcacctggcatggcttgctgtcccttgctgtctaagagtctcgggaagattgggcttattgtagacgccgtatttctcactttattgctgaaatcacaagagattcatgaaataactgatatcaggggtatctacgttttgatgtcccctccgttcggcttataccagtggcatgggcctttcaatagcctggtctatttttgtaaatgtgcgctatggcccatcagtaaccgggaaatctaagacatgccataaagtttaaagacaatgcattgcacaagaaaaagaagatctcagagttataggctgtcaacaaccaaaaaatcctccatgacagtctggttgtacctgtatatgctatctagccccaaaacgcccaggaaacacaacaggtcatatggaaagcgaatgaagccgatgtacctaatcacacaaaatgcacccgaataacaaaagacaagaaaatgctaagtgagaaaaatgaaagcgctgaagtcatcacatcatatataacatacctaccctacgcaagagacgtgggcaagaaacaaacgaagaacaaaagatacgcatataaacagccacgatcaaacagtgccgtagcggccgcgctctgcgcccaacaaagcctgtccctcttgagaaaccgaagattcccttgagtccctccggggcgaagcagaggggatccagcctcgcatccagccgtgaacatgcctccagcgactgcgaccgcgctttgggtcatccccatcgccactgatgaaactctcgtcatcctcgtgctctggaccatcgccatacatgagaaactgaacacccatgaacccgtccagtcccaacacaccgaatgcacccaagaagaacggcgtagcgcgtccaatccattccaacctgttattgccgtggttgtcagcccagccgccgccgccatatggggagaaatcggaccaagcattcgggttggtgagcatcgagctggagtagaacaggttcccacagaatgcggccatgaagagcagtggggaaagaccttcagtgctcttgcgctggtagtttttgtatagctgtggagggcgtgagccgagatacaggattgttgacatccaagagaagacgcggccgatgatctcgacgatggtctcccgcggtgcttccgaaatgaacgtgtcggacttgtcggtgggggcagcgtttgcgagtacggcacaaaggagtgatgccatgagcatcgtccggggcagtgcgaatggcgggctctgcatgctactgcccaaccttacagatcgacgcgatgagctcaatttctcgtttgagtatgacgctgttggcacatgggtcgagtcgagtgctgacccggcctggaagcccccatccttggcctcggggtgcttgttgttcatgttgacgggagccggggtctgattgtctgagtcgtggcctggaggaggcacgccttgaatgatgtttcgacgagccgagtcatgcgaatgtgacaagtcgtcatacgaatcattctggcgaggtttgtaatgagtgtaccagaaaaactggaataccagagcgatatcaacgaagacgtaataactggcaatcacgacctgccaccctgcctgtcgggtatatagcgctccaacgaggttgctcgcgtcaccaaggcaccagattaccaagaaaaatatcgataagcctgacgtcgactgcacttggtagttcttataaatctggggtagttgtgcgaaaagccatgagactatgctgagggtcccaaggacggaagagatcgccgcgagaggagtggggatgcagatgtggagatgcgaggagacggcggtcaggaagggcgaggtcggttcacagtggtcaggaagggtcccagagaggaggtactgtaatagtggaggagacatggtctgacgatcagggtgtctttgatagatccggtgacttggtacagcctcgagtagtgactcgtgtaggaccgtgtggcattcaaagtatggggtaagggcgataagcggatccgatgtgaacgagaagaagagaggatgtatgctctaagtctagtagagctaatagaccgagtaagttggaaggagaaggtattaagtaagtgaacgaagcaggaactggagagaacagatcttggggtcattctggagtgtcacgagagctgaatcgattgccttatcgagctcatcggcgcagatcggatgactcatgcgataagcataaaatgggcgtatcagggcttctccgagcttggaaatgcagcaccctgcatttaggtaacacatcattatgttgtacgatgtgagccatgatagttagttatcataaggatcgattagtcaaatgttctatacctaactaggtacctacatgtcggtacgtaaggtaccatctaaactcccaagatcttacatcccataaataacttggaagtggcaacgacacatctcaaagtcatggataagaagctagaattcaattaaaataacgtatataaccgtgctaagcgcccgacacaacatcttcccaattaggtctcttttgtatggcttactctacttaggcactatatgaattttctcaaccctcggactagctaaagtaagagaaagagcacgaatatataatgataaatttagcttcgttgatttaatgctagcattaattcccgatatccaatgagaaagaagaatagtatttaacaaagacactatacaaaggttctgcggtggcaatttcggattcggattctcatagcacgtagatcactcggtccattggaggggtaggatgtgagtggattttactgtggttgaatgcccatttgagcacacttttactgccttgatgctcggtataccgatcaagtactgtaatggtgcagagggcatgtcagtcgtcgccctcgggggcctctgcctccacgagccatgttcgttgatgatgcaattcatgttttcaatgacttgcaggtttcatagcaagaattgaaatgttaaaatgagattatttcctaaacgaaagtgagggtagataggtcgactaaggtgtagtgtgatatgaaggtcaattgaaacttcatgaaatgagagaactttgatagaagttttcaaatgatcattaaatttggtgtaatgcttgtttataagacaacaacctagacgctgctccttatatccgaggagatccacgctgctaatctttatacgcttcaatcaactgcggtcgcctgttaatctctagatatcctacataggtaggtccctattatgacgtcgaagcaagtcagtatcagccgctcaactcttcagccagctggaaaaggtcattagcacatgcattgaaaatcctgaagatgctgccacggtcactaagtagaagggcgaagtggagctggcggctatgcacgccactcgcagccattttgatgttgtccaatattcgtcatcgaatttcgtattaatagttctatactatttaaaggaaattgtagaagagcctcgctacctacggcccggccgcacgccccgtatttatagttggtgtgcattaatttactagtgtagtaattcattgggctaactgtgcatgttgtcacacatgaggtaaattaaactctgcttacatcccgacattaattgtgtgatacatgactcgctagctgctatctctataccccggcttttacgcgggctcactcaacgagaggtggctttgctatatgtgtctgacccgcaagtcggaagctggagactcggtggtcccatcttctattttgctggagtcttgttgtcttgttgtactgaactatggtatgatccctcacgaaacttcaaaccagccatgtcatgtgctcattgcccaattatcatgccactccgcactaagcgttcaaatcacgcggccagtgatgtagtaagacgaggtgataggcacgtaaaccccgcaagaccaggaaggttctctggttcgggtaggtcattggacaatggtgttggcggtcgtaccatccgggcgtatgtagaatgaattacatcattacaagcattccccgcattctggggtaatatatatatatataaaaggttgacatctctgaattgatttccaggagtctcacttctacaattcttcatcaattatcacaaatacctcacagattttcaatatggataatatggacaagtacaattctcagtgggtctcgttccacattcgggaccacatcaaagatggcgagatcctggtgcaaaacactgtcattgaagggtatctataattacagagatacaatagatctctactaacactcggcagcgccgagttcaccgaccccaacaaccgacgcaagtcgctcactgaagaggaggttgacgagatcaagatctcccacgatggcgttggcgagatcggcgctagcagccgccgtggtagtgagggccgcctggacttatttcatgacaatgacaagatttgtgagctccactgggaaaaccgaggtggagactacgccaacttggtcgaggtgctggacaaaagcgacaagtacaccatccagcatggaggatggagtgctgaggccggtcccctgggacatgtctttgtcgatgtcgtggagaagaagaaataattacgctccacaggctgcaccaactccctacttgggcgttgaagagcaaagagtgcagtccgtggagtatgagtggcaacatttggcagggaaagttggatgtattctaaagtgtcataaacaaacccaaaaccaccaaaaacaatgcaaaactttgaaaaccagtatcaatttttattccatcccaattctaatacataggtgggtgccaatcaagcaatttcaaagagctgcccaccgagccacgcggggtcagacaacttcattgatgccgaacacgagcagtgccttatcgccgaggggctagttttatggttggattttggttggcttgggctctgaatccttgtctgagtagtttggaaacccacaaggtaccataaagaatcaatccttgaacaggcaactaagactcccttccgcgaaccagtccttatcctttttccagccgtggacgatcaaatctcttccgaccttcaccacctcctcaatttgcttttgagttccccatccagggactctacttccccagcaaatcaggtgcacaccaacgtggatcgcagtgcggaaagccatttcatcatcaagggccccgtatccctctaggaatccttgcataatccacagtccaccgtccacgttcttgaacagctttgtttcgtacaactctgcaatcatttggcccaagtccaatgcccggcttccgatatgcgacatttcccaatcgacaatgaacattgtcgtcttggtttgacgagtgagaggctcgtttggaagaagaacactagaaatcacgtcattaacttggctcagttcatgaagtctagatccaatagagcatactttccagtccagaagtcaccgtgaataattccatatccatcatcatgactctgtcgctcaagctccgctgcagcgaggtcgcggaccttctcgaaaatatcacgatcctcctccagaatactggggaagttttcaatcgtgtccatcagcatagtgtagttcacccagaatttcaaatctttcatgaatttgttctcgccgagaagttttgtagattccatttgctgttcatcggccgtccaattgtgaaacaatctcaaccaggatcccagggcaccgcccaaggctcgccctgaggattcggacaagtcatgcgaaacctctgagagcaggaagttcttcaggtcgattgaatttggaagatcttccaaaacctgggtgtctgtctcctgattaaagtctaataagtgcggtgctttgacacttattttgccattcgtatatattgccaggccatcgagggcttgaagaatggcttcctcaaagtgctaatttgagatcagcatagttcgaagcaggctcattcaattaaaagcaactaacgcatctcttgacatcgattttaaaatctgggttagaggccgagtgatccttggtgtgcttgatgacgattgattgtccagttgaggaaagtctacctcgatagacaaagttggctgtgcccccagacaggcgtgtgagcgaggagcatgcgaaaggagtgagggaaagttgctgggcaatttcatcgcgtgtttgatcctcattgatatttgccatgttgtatggcttctttgcgtaagagtaaaagattgcgtgaaggtgaagggttcaagagtgtttccctctaggcttaaaacgcgctagtacgtatatcgtccccgcattttatctccactggcacacccatattccgcttttatcgccacatgtctcccaggcaaagtctcaccttacaaaaatgcgattacagaatattcaccctaaagtgcaggtcaacaggcattctgaatattcccttgttgatgttatggccttgtcacaccaaaatcgtgggctgcatagcatcagcgatgtctatcataaatttcagcctggtcgagaaggataggagagcccagctctaggctggctagattatgctactcaaaatcttggccaacccttctttcgcaagctagctttgctgcctagtcttatatggaagggaaacgggctccagcgttgcttcctatgaatccgagactgtctacctagatctaaaccagggcatacatatatatgtagaagatcaatactactatcgcttaaaaatggttcgaaaactgccagctattgaatccgtcgctttcatattagcgatatggggtaacaacgccggattaccgttaccaccacagttgcaacattggaaggatagtgtggtgaaatctttgtttttatggaagatagaaaccctcctaagcccatgatagctcagtatctaggcacagtaccgaaaacataattaggagggtatttgtcctttatcggaatggttgaagagaatgatgaaaacaagtgcatcaagataataatgctgtctctaaaccgatagcaagtctcgagcaaagtagagtacatgacttaattccatggcataaggtcggaatcctagcgcgacaaaaaaaaaggaaaaaaagaaacactaggcaaaagaacactgtccgaagtcgagatccgctcagtattcatcctcgtagtaatgtctcgaatggctggtatgatgagagtgcccgctatggccgctatgactactatccctcgaatggctccgatggccatgatggtggtggtgacggctccgatgatcaccgtgatcatgcccatgctcatattcactatcaatgtcacgcctcttgtgatccttcactttgttctctatgaagttcccgagtagcgcaccaccaatcgcacccagcaagccatgttccttcttatggccgagataatagcccgccacgccgccagcgatcgagcccccgagcccacggtccataccccggtcagtgtcggtatctgtatcgaagcgctgttcgccactgcgctgtgaatactctggctctgatgcatagacggcgggagggtggggacttgcggagggtgtgtaccgtggttggctggccggatggttattgctagggctcggtgttagtactatagcttttcacagctgggtatgcatcgcccactcactagtattccgcgttcccggggattctgtcttgcgcatgttggtatcctgtcggaaccactggcccaaggtagtctggctgccctgtcggcgtatagcttctttcggtggaggatccatatggatctggcgcaagttggtatggactttgctgtggagcataggcttggtttgggtttggactgggctggtaaggctctgatccggggttctggtatggcccttggtttccgtaaggctgccggtgaccatataccgggtactgaggctgatcctctgggcgatagtagtcaaccccgctcggggtaggcgttgagtgtgagttgtaagtattgtatggatctcccatggtgatgcgatagatatgttaaggaatcctgtcgcgtcaagaacgggaacacaggaaggttcctatatactccgtacctatgtgccgggtttcctttgccccttccgtattagtactcgcccctcccgccgcttttgctcattgagatcatctcaatcgatcaccgagcctgaccggagtgccccgattcgctcattgagcctcttcggagcctccggagcggaacagtaacctaactaaactaccaatacactagccccactgatcaacaatatttcattttgagcatcgcttatgttgtacgaatctgaatggaaagtgagccatttgtaattgaccaatcggttctcagcgtagttcccaagctttcgggctcaggcttaggaagccgtggcactgaagcgttgtcgtcacagattcattattgttgaagagttgtatatgctggtattgttgtcaattagataaatcaatctttggcctctcgcttcctgagctagaaaggcgtttccgtacctagctcctatttgcacaaagatgggggacatgcaactctactatacagatctaatagattgatactgatccgccacgtgacttcaccgagcagctcactgaaattactcggtgagcctgactctgagcgccctgattaaagcggcggcagctaaaacaggaaagtctcaccttgcagagatagatcagacagatgacttgcgggccctatatgtacatgcgtcatggtgcagctgaccaacccacacgaccctcgccgggacttcggaatgcacctgctctccagtcagatactgatcatttgcttatctgtacacatgtatagtttgaggagtgtgccttctaatgttttttttttctcttcccaggggaaatctgttcggcaactgatattgtattgagatacgccagtcgattaaccttgaatgataagatgtgaaagaaataaagctgaacacggatgagtcggggtattccggtaaaaatcgaagaaaaagatggaaagcatggtgtaaatagagctggccgttagacgttcagggtcacatcgctctctggggcgatggaaaaatgcagaacaagagtgcgccaagcagtggcatcaagacacagcacaaaaagtaagaaaaaataagaaaaaaaataagaccggccaaaagtgatgcgcccagcacattcagaaacatcctggccttcatcgccatgcaaggcggactacctatcaacacatggttttggtttcaagagattcatacacacttgattacacttgtggactccgaatgccacgagtcgagctgttactccgctgtgacatccagttcacaagcatctcgtcaagctggttgttcatctccttgagcctcttgctttcctccttgaataggcgaccggtgatggggtggtcagggccagcgggaggtacatttgatttgtcgtggacaataataaacaagtcgcgaatgtcattttcttcgtccatgtaggatcgcagactggagtcgctccacgtcggggtgtccacagaaagggtgtcgactaaagcaggagtagccgtgccacccttggggtaattgacgtcctgtccgggtgatgatggtggagacggtggcgagcgagagcgtacgtctcgaggagagacattgcttgtcgaaccgcgtgcgctcatgggggaataaacctccacgggagaaatattgacaggagactccgactcatctccagccaccagcgtagggacgaatttctgggcggacgctggtccggccgttgtacgacttggatcgttaggtcccctccattgagattcactagatggtcgatcaacgggcgactccatggggtccatggattccagcggagtagcaaagggatccttggaaaaactcgattggctgataggcgattgtaacacaatttcacaatcttcgtaactgctctctctttcttcttgtgacacctgtcgaatgcttttgttgccctggctctggttaatggcctcgttgcccctggcgaactcggccatcgtagggtcaaggacaggatcaaccttcatgattcctcggggctgcttgtgtagcttgttgtttgagaatttctggggcttagagggtcgctgttgttcgggggacatagactttgatgagacagagtccatcgaggtcttgggttggggtgatgtgcgggatgccgactctggagacctctctaggtcgtcaatgtcatctttgctcttcttgcgcttgaataacccgctcagcattccaggttttttgtctttacgcttcttctcctctttgtctttggtcttgtcttgagagttcgagcccttttcgatagattcaaggcttccacgaggcttcaccaaaacgtcagccaaccagtctttggataagcccacaaaggaaacatacctctttccactcagctaatgtgtttgtgctgttttcgtcgcgaatatcgcgcaggagatttggagtgagagaaatcttcttgggctcggccgtgtcgtctttgaagaaggaatcggtgttccgtacagtgccatttctggatctactgacgggggcttctgctttgtaaaagtaagttcagataccgccagagagaagttgagttgagtgtgtttaccttctgcttcgaagaactcttcactagacgggcgtcgatcagagtttgaacgctgcaaatcttgtttctctacaccgttagcatcgacatgctctgtggggttttggttctctttctgggcttttggccgaagaggttccacgacaatatcttcagcttgctcttgcacgtcttcctcttctccgtccagagtctcgtcgtcattgaaaaagtcgccgtgttcggaatcgtcgtccgttgagtagtcgacgtcggaggcatcgatgtacgtcggggctccgaagttgacggtcttcgcattccgacggcgcatggccttcttcagaggattcttcgacttttcgttattgtcacccaacatggtcgcagacaaatccacgtttctgtgtttattcaatctggcaagcctctcggttggtgtttcaatgtgttccgcagggaggtaaccgatgctgccatccttcaccacccgcacaagccaccagtagctgttgctgtcgtcgagaagaaccatagtatcaccctttgcggcattcgcttgcccatcgaccgtcgcgacgaagttatgaagcgcatatacaaactcgaagtcgatatcctctgtataacatcagttaacgcccgattgatgtctatagtccccgagagtccgtaccatcatcgatagagggcgagctggagattttgtccatcatatcatcgtccatcatatcatcgctttcgccgtctgccaggtcgccatcttcattctcgtagtgattttcatcctcatcgtcttcctcgtcgtctgcttcgcgatacgcctccttgtcgctgcggtattcttgatttttgtgcgatccgtcctttaattccgcttgcgaatcttgctcggcatggcgaatagcaagcccttgattgggagcaggccggccgctcccaagaggatctggttgttcgggttgtttggtgtgatctttggcggaaggggtatcgtgatcttgaaggtccaaggtatctagtggcggtcaacaccttcaatttcgaaccaattggcctcgcgctccagaagcatgtgacctaccagctcggatcatctgaggcctagtcatgttgcggtgtaaatgagtgtggtatcaagagcaatgggattggaacaagacgtgagcgcaaggagtgactagcgatccaggaatacggaagtcaagaagacaagcgcgggataaaagcaatgcgcgagccttcaaatttcctgtatccaagtaatccacaaatactagacagtaaaaaaagtcgaccggggtcgcgagcacttggtgagttggtctaaatgagagacagtgccttgaatcagaatagtgggggctggtctgcacttcggtccagcacggaggtcgacacaaggagaaagaaattactgccagagcgacaaggtgggaaaaaaaggcaggaacaaaaaaaaggaacaaaggagatgtctgccaagacgacgttgagtctgaatagcaactcctttcacatctccaaaagccaaaaggaggtattcccaaacaagcgccccttgcgcgcggttaaacccatggcttgacccctgaacccatatgcgggcacgtaatattggccgactggtcagagcttctatggtatactggcctttgtaagtctactagattggagctttttttcaggcaattcaagtatagaataatatgctcttcggcactcgatacagactacacagcactgtgaagaactatcaaagtcgtacggagtacggagtataccatatgtaatcataattaccctgcatgtcgctaattaccgctgtatccctgacacatctagaaaattagggcgtgggatgctctttagtcaggtgatctagaaattatcgccgtcatccgagtttccccggtttttttttcccctctcatttaccagactactccgtacttgacgaatacctcactcgcagtctctctcctactacctttgtctatactcactgtgcttaatctcgatctttttatttgctttctcaagtttaaacccccctcaattacgccttcctttacatcaccactgtatcaaacgttctttccccacttttgacgctatcaccccacaatcataatcatcttgaacgccatcgcgaagcgtaccgaaacaaaaaaagccaagcagagggttatataaccctactgcgagcctatcacgggctgacaataccaacatttcgcctcgttatcctcgttagggcatggcacatagcgagagggccggattggcaagtggattggcaggtttaaggattgaaacgaagtttcatgagcggaacaagtccaaatggacaaatgagaattctgtgaggagagcgacgacggtgggcgacggtatcgagagcgatcacaccaatcaatctcatgattatgcgcgtcgccacgatactgatcaagaccacagtttgttaagtgatctacactcagcgacccctcccatctccgttcctcgtcacgatgcgcagcatcatgcagtcgatgccgatagcttcccgcataaacccgatagtgtgcaagggtctcctctcgacagctatctgcacactcgtcgaccttcgatctctttcaacccgaaggtctctgtggactccggaaaccaaattccactagaagagccactgtcgatgggagatgtgaagaaccgtccaccacaaaaatttgagtctcggagctctggactccgaaatgctctttcacaagatgatgagcatgtcgaagcgagccagtccccgaactggagtcctaaacaatctctggatcggagttctccgaccggggaatcccgaacccaaccctttgctatatctgagaatggctcgaacgcgggctccgagctcgttcgtccgacgtccctgacatcgcagtcgacggtatctccggtcacggacgaggtacggacccctcccgattactccagtcacacgttgctgtcgccattttgcgtgccgtcaccgacgcaattctttgcatcgcctgaagacaacggcagttcttggtcgggaggaatcccaacatccttcggaagcaagcgtagctctaccctcgatcgcagcagcagtcttcggaactccacccggcacagttctcggcgatcgactaactcgggtggcaagtcgcccgccagtatgtttctttccatgtggaacaatgttgaagagcctgctccccagcccgatgacgaaggacagatggttggagacgactatgttctcggaaagcaaatcggatttgggggttttagtgcggtgaaagaagcctataaggccgaaaagaacggtgaaaccaaaagacttgccgtcaagatcgtgaaaaagcagattacagggcgaagcgagcacgaaaacgaccaagtacaagccgagttcgaccacgaagtgcgagtatggcggtacctcaatcacccgcatatattgacgctcgatgccgtatacgaaacagatcacgccacgttttgcttcaccaagcttgctattggtggtactctcttcgatctagtccgccaaaatcgatccggtctagatacacaattagcaaagaaatatgcgtaccaactagcctgtgcaatccgttacctgcacgaagatgcccgcgtggttcaccgagatatcaagctagagaactgcttgctcgatcctgttgagtctgctgacgacacaacatcttcaaacttggtattgtgtgattttggaatggctgaatggatgtccatcgacaatggtggcgactctcccgatccctacgaggatgctgctgaccgtccaccgcctcaacaaatgggccctgccggatccagtaccagtgtggctggtagtctggaatacgcatcgcccgaactgcttcaatcagtaggcggtgttgttcacccttcagtagacatgtgggcctttggcgttatcgtctataccgttattgtcggctcacgacctttccaagactctttcactcctcgcgtccaagcaaatattatcagcggcaactgggatcataatgctgtatacggcgacactgtggacggcccccttcgccaagatcgccagtatgccctcgaattagttcgcggctgccttgaaatggatcccaacaagcgttggactatccgccacgtactagcttcgtcctggctacgagaggttcatgaggcagctgaaccctcacccgatactgtgtggagactatgagcctttgctcatcttttcttcgattcggtgattatgtcctgcccttcactataactcctaaggcaaatgagattgtcttgaaggttttaacttcaaatttctacgctgtgatggctctctcttcaccggcgtggatatttaacaggcgcctttgagatcactatgatacccctccgtttccttctctttgattattttgattatttgctttgcttctgctcaagactgttagcatgtgcctttttttttgcggtttctattatctattttcaatatcccctcgcagcacattcttggttttgatttttggttgaatttggccttggcattacgagacggacgactatgatttattcttatagcatgcgtggtgtttcatattattattatcttttgtcggacgttacatgggcgttcgtcacttcagttctttgctttgtgttgttaacttagcttgatggtttgcttctactgatgtactttatatctgccgatctttgatttaccgatctggctttgtcttctctactcgatttggtgagatatctgtccggctggctggcctgtcctgggttcggaacaagactgatcaagttatgtgttatattttgcaactcgcaagaaaagtcggctgcacatgcggcctctgtccttaaccgcatagcactttgataatctgatctatctggctcaaattacatgatattaagcgtattctatctaaaataacatttcgatatctaaattttgtctcggtgttatagctaggatggtagcatgggaccccccttgtctatgagactagcgccaggaatcagaataacagtacgaactacacaggtatatcgagctttccacaggtgcgatggtagaatctctcaaggtgcagataataaaacggcctttccgtatatatatgtgggcaggcagggatatttatacataaccctcgagatgcttataggtaatgcaactattcaatcttccctagaacgaaaggtcttttggggagtataatagaaagatagggacgagaagcatttcattgccaagcctaacatatccaacagaacatatttatacatatacagcagaccagtctaaaccagccttaaaaaaaaaacaatgccgagcaaacgaacaaaccatcaaacagagatcaagtatgagattctcaccaagccctcaaatctaccaaagcctattctcaggcaagaccttctccttcttaacaccagcagtagacttcctctcctcagaagagcggaagaacagactgggtccctcaagcggcttaagcaggtgggaaagatatccgcgatgcgcaggatcacggtagtactcgatatctttacgcttcgtcggatccggcagtcggtacttcatttgccggttgttgactaccgtactccaggtcatccaggccgccgtagggcgaactttggcgagtttgtagagctgttcggagccgctagcgcgcgcccacgcagcagacaggaagctgtgcgtctcgccgtccaggatgcggcgaatggacggccgcgtgtagtagcgggtagtcactgagccgccggcgccttcgatggccgcgatggcggaggcggagacgcgcgaggcaacgacgtggattggttgtttcaagtcttgggcgccgtcgccgaggatcttgaggccgtcgataggtcggctgatgcacccgctcttgtagagctccttcaatgtaatcggttgtttagggttgatgcggccttggtcgatccaatattggatacggtcgaggttgacggttgccatgtcgacggagaagctggagccgaggagggagactgattagagatgcactttgggggtttgtggtggttttgacaagggaggatgacttacatgttgacgccgccgcgctcgccgtgcacgatgatatccttggtctgaccaccattgaagcccgctgggactttgccgtgctggccttgacccttgtgaccgcgaccggaggtcttacccttgcctgaagcgggaccgcggcctcgacggatgcgcttgttgtaggcagtcgggttgtcggagagggaggctaggatggaagcgttgcggatttgctgggattgggggaggaggaaggcgagtggagaggcattttgaaaggtccgggcggagaattgtgccagctgcgtaggcagccccatcagccggggagacattgtgtgtgaattgggttatagcctcgctggtgttgcattcgcgggttagtggtgagtttcgagatctctgtcggggcgggttatgtttgatccgactccgggatggccctaactaagtacagtatatcagtcgagctgggcaccgccaagccctgtgttgctcgttcggatctttcaagaaagatatcagctttttggataaagaaatagattgggttttttatgttccttttttctaatatatatatcggcatgtattcagacagtcgggtaaatgagtcaatatataacccaaacccttggttatacatctaaatctactatgacgctatgcaatatggtacaatgaaagatagtggttcaagggaaaaaaataccagttggcaaatctaaattcatatgctgcagagctaaagctatgtctgcgaaagtcaaacgccgtatgtatgcagaatgcgataggagcagtacattgccgatgtgctctgaggcacattcgacgggcgaagataaagtcaagaataacgccgcagatgccatccccgagattgattccgtctgcagggaggcgaaaaccgagttccttctaaaatggagcgccgaaaatatgccaaatacaatcgtgaaaatgaggaagtctgtgcagtcgaaaaaggaagacaggcaagagaagagaatagtaaggtgtacagtgaatgagataattttttttctcgtgtgacgggtcgtggcgcggtgaagtcataaacgcaggagatgtggtaaaacggggcacagaatgctttaaccagagtaaccggtgggtgggtagataggatgcaggtaaggagcttggttccacgcgtcaggctggatgtagggcagcaggccggtcttgcgagaggtgttacccttgctaagcggctggtagtgcatatggtcaaacggaacattgcgctgctgctgtagagagcttgacggaggtggaatcagcaaggtgttgacggaacgcactggccggtaaggcgagttgcggttggcgaggaagaaggaaggagagaggtgggtctgcggagtgtgggcggaataggctgaaccaaccggcgagacggtggcagaagacacgccgaatgggctctggtggtgccggccgagttcgggcagagaaggggtggtgtacatgctagattgcatcgggggtacggagagaggaggcatctgctgccaattcgccgggcgattgtagataggaggcatgatggctggaaggtgggagggtgccgtggaaggaagtgtttgaggcgcggggtaggaagttgggaggggaggcggatggtgaggatgcggaagacgagaaacgttcataggtgccaccggggccgaagtgggagtcaagacaggtggcagggtgggcatcgtattcatggcagtcgccgggaccgtcatcgacggagcagatgtggcggaagacggcgcgaaccgcttggtcggctgaagctcatcgttctcatcgcggcttcgtttccgagagcctcccatcgcagcctcactgccgatgtgctgtggcggcaagtatggcaatccattaggtggcatataccaattgggctgcggctgggatcggaaggcatcggtggtaggcgacggcaacttggacggcgactgcgattgcacgcggggaggcgaaacacggaacatggcggctgattcggcgggtagcatcgaggcttggttgaagtagtccccgaagagtcccagcttggtgtgccaccgggaccattcggtctcggaggagaacagatcatagcgaatgttgctcaagaactcgacctccataatgtgaatctcgtgcaccgctatacccgatacctcagcccacgtcttattggtgtaagtgttatcgtcgaggtctgtggatgagtcagctacgttgtccaatcaaggaaagggcggtgaaactgataagaaccactcacatttattgccgagcatcagcgcaaccgtcatcaaacggaactcgctgcctttcttgcccttgaccccagagttgaatttctttaggcggtaaatgaatagaagggccagtagaatgacgttctggctgacttgcgtcgtggaaagaatcgtggcgacccatttttggaatccgacggtaggtatggcctccgcgaccagggaaggaacgggatgttggcggtcttcgatagcttgcagtttcgaggtcttttcgaaccagaagagacaggtcatctagaaatccagcccgttagcttccacctcacttttgtagacctgggaattctcacctgagccgcaaactcggccagactgcccttgctgttgttgatggatgaggggatgcggagttgcgatccagttgcaccggttgacttcttttgcgccgttggttccgttacgggggcttctttgggcgcggggtgggcttgcggtttcatagccatcatcgagggaatggaatcgaactgcgggcgagtagggccgtataggtgcgagggcaccctgttcggtttccccccatatgcgataggtggcatggcattgtaggtgacgccggtcatatcgtgaggaggggtgggtagaccgttccgaatgggaacagtccgataggatcccgaggtctggctctcaaaagcctttgccggatgatcctcagtcaagtcaatggttggaactcccagtgtcgaagaggaggaatggaagcccagagtggaagacatagggaaagagtggtgagcagagaggtcgacacatggagttttatttcttttatttcttttttttttcccttttgatcaaagcaaagaaaggcgtcggcggatagaaccgaggagtttcagtgatccatgttctcttctatcaaaggtgaaagtagagcgcagacaatcgatgagagtgtccaattggaatgcaatcaaggaggaaagggcgaccggcgatgattccaagtgagggaaaagtgaatatcgaccgttcacagggagtttgaatgatgtatatagagtagccacgataggcccatataaggaaagtagtgataaaccatcagagatctggctactccacttggagatgaggaaagcgaaaaacggcaaaaatacgggaaaatgcaaaagaatccaataaataaaaccaaataataaatgtcaaggcatccgaccccatccggagaaagcgatagtggccatacacagagtttgacccggacgcaggtccaggttgatcctcctttctgggctcgtttgggttccgggtttggacaatctagaattggaaatatataaaataaaagaaaggaacaaggtaaggtaacaagtaacgggtcagtaaccaagtcagaaataataatcagaaataccggttgatgtcagagccacggggtgctaagtggatgcaactaaaaagggtaggtcacagaatgtttacctggtcccggcctcacatttgcagttaaatgacccaagttgactatagcgtaggactagtgaaagcaaaaagagggaaaaaaaagtaaaaaaaaaacaaatgaaaagtaaaaccccaaccaagttgaaatcaaaagagaccatcctgagacccatctcagatccaataataagtcaggtttagcatcaataaattaccaaaccgtgttatgcggaagggctgtgagggtgcgcaagcatgtaggtactgcaaagagaaaaagggctaaggggtggtggttgccgggaagcgcgggggggggccagggaggtttgagcacggtggctggtacattacttgtcgtatactatgggaaaggcaaaggaatgaaccgaaagaaaagaaacggaagagaaaaaaagaaaaagaaaagaaaaagacaccaatgatgagcgagtggaagatcaattacttggttgaggatgaccgaccaaagagagggcagatcgggagtctcggtaagaatggtgcattcttaggtaagaaggcaaaattactgggtattgggccaatcagcacccagagcctcggtattggccggaatggtccactcccagtctcaggccatatttcgctttaatctttttttattttcttttgttaatttatcccgtgtacgaccggtccacggtccagggctttcatcttgctctatcacacttgtgctcgcgtactccccgacttgttagccgccagtcattggttccgtatattatgcccagctttatgggtgagaggtaatttattcgcgtcttttcgtgtcctcaggcttggtcttatcccgtccactgttccggctttcctgtttatgattcagggggatctcatcataattacaggctactatcccaattttgatagttcagcctcgggaggagggcataccggccatcgtctgattcgtccggcttttatgcactggatttccccaaggtatttccctctccaatatacagattggtcaccacatactactccgtacctactttcatatcatgtacaactggtacatcggtatttatctcccgtcaagacgccctggcatataccaccgggactgttggcccccagtgggatgaatgagcggtttcaccctgtttgacctgtccagacggcacaagcttcacgtaaggtggcatgtagttgcacttgtgatccagtgtagggtagaaagctgaaattgcaacgggcccagatcggctggtggaattggaatccatcgctcgtggcgccctaacggtcatcttttcgagaaaacaagccgtgacggcccagagatgtgcacactcctcgcaaactatattgctgcatacaccggtaccatgatgtggaagtatcgtgtctaagtgtctctgtcagcaactcatcctagacacgcaaggcatacctatcgaaccactggaatcttcagaaaccttcatccccatatggtctttgggtggactctcacagagacacttctctatcaccgttcatgtccgaaaccaggttacttgggtaacctccaaacttgcctagggatgatccaattgtgctattttagtggcaaaaccaccaagcgaagtgtccggtcacccaaatcgtggaccttcataaaaaataagttgatcaggtgaattttataaaaaaaaaaattcaaagaaagaaagaaattgcaccctctttctctccactttggtttctgagccaccgccacggaagatgtttcgtttctagaacccccagacagaaggtggattgaacaagggaaagtccactgtgtcataatgctccatcttgttagacgatctatgctgttgtcgatggtttgaaattttctttttcttttcactttggcccagagccgactcctgattggtcaagtgctagagtgcccccgtcttttactattttaggccgtgtgttcgttcactcgtcacagtcatacacaaaagagccctggagccttgggagccagcgtcaaaggttgtttgactcggagctttgcccttttgtttcccccttgatctacattcgcttctgctcttctctttggtgggtcgaaacagaaaaaaaaaaggagtttgctaaaatgaagtctttacccttgccatcccggttgcggtatttcatttcgactgcacaattcccggtagctccacaagctttacctatcgcctttcgcccttcgcgggtgagattcctcggcacagtactacatgcagagttcgcctggccacaggctatttctaacctttcttagtctttaattattgtatagagagagtggggggaaaatatatttaattgcttttttttggaaaatgtcctcccttggaagaagtccggagtatcaccccctgtgtgtatagccaccgtctctttagacaggttgtacctccgaccattggcgcatgcagttggctgcgaccgctatgatcgtgatcttctcggcaatgtcataaattcgaatgtgtatcgtctaccgacatactgagtgtcgacctgatgcacgcggaaccccatcctatcatggaaatcatccgagctcacacctcgaccttaggtccgaggtacttctatcacctaccaatcctaccatgttgtatgtactccgtataatcacggggcacttgggaatatctccgcagcactttgcgcagcactttgcgcagaaccacacttcaatgttgcctcttgattggcgacgactaaatatccagagttttcactttggtagttgcggacagtgtgctccgtacgagaaacccacgcaacctggaatctaaccagggttacggagtaataatggttgggatgtctagtggctgatctaatctcgcaaagctgaagccgatccctttacgttgttgctcctatatcgtatactccctactccgcaaggagtaacttcttctatagtataatgataatccattcaatcaacagatcaccggcttactccgtactcagtctcgactatcacaaccaggatgtgttggctctattaattacgcattaaccctgacaccttccttcatcattacacggcggggcttggattccggtacaagccctctgcgcccggcatcaatttcctctggaattttaaattgcttacaatattgtggcatttaatttccttttctcttccaagtaacctatcttatgcgtcagtcgcaaggccaaaaaaccccccctacactttgtgagaacactcaggatctcaacgccgtgttcaaccaccttgcgcctcttacctagcacggctccttgcatgtctcccatctgtgcctaaagtactgagggcgacggaaatattaaatagcataggaaccctagatcattgcctcgatatcacataaccacacatgtagtattctggttcctctatcggtgcatacactatctgggattttctccgctctcgtaaccttgtaatacgcaggttacaattatctatgtcgcggattatcggtttgatgcgctgcttcgtatacattctgttttcgatttcaatagcataaggctgctgcaattaatcttctcttcctggcgtcatttgacccactcccgggatgaaggacacggcatgcaaacatctttaaactcttagagtaatccttactagacccaacaaccggggtggaagttggtggaattaattggagactcgaaattacagatccggtcgggacccataatgtatagattgtcgctacgagtaaaacgttaatattacctagatgctttctatatgacgtcggcatccgcagtacaacgttctatacggggtatattggatgtgatatacagtatgtatatcctgaagttgtcctgtgggtgactacggagtacttggcacccatatccatgggtaattctagcgctgcagtcttacgatgatcacacccattgaccctgcacgccaccccagagggttgcctcttccctttagtctcttccgagtagtcaccgacagaccgccgcaacccgacctcgacccccggaagtgcacaatttgtcaagggcaaagacaagggcaaatgcaaatgcaaatgagctcgggcacggccgtgtgacagaacggggtcatctcgaactatcagttgatgtttttttttttttttgaggctgatctcggactcgagactctgtgcttcaccaccccgcgcacaggggccaaccgccagagatactccatagagggggcgagcccacacaatccacacagcccacatgctcgcaaagtttcagaggcatagcaagttgaggggcaataataatcgaccggttctttttttagctttttgactttgtgcttgaccaagacttatctcacaatttgtctggattgtgcaaagcgccccgagcaccaagcaaagtgctaattccgagactaacagggtactaacaggatcttgaatcttgcctttttcaaagactctgcttccgcccgtgatttgactttggcggattcgagaatatattccctcaatggagccttggctaatcgatactctttttgcccccgctcgggtggcttatagttgatcaacgatcaatgcggtgacggtgtacggagtagaatctgaggttatgtgatctctgatatggtctagactgcaacatatgtactgtagtcagattcgcatccataatatactcggcacacaaactgtgggggaggacgtattacgcagcctttgtctcagtcgctttcaacgtctaagattagttttccaggcttaataatgcaagacacttggggcttgggagtctagagcgatgataatatcaagtcacgactcgacgatcccagtcggaacgcactgcaccggcatccgatgccaggaaataaattcttctgccttaacattttacttagctttgaatggtggagcagtcaacgcgtactccatacacattctggcttgcacctttcttgctaccgagtaccatagtccaaagtgtacacaagatcgcatattccgtctcatccgggagccacttcttttcacttttttgttctttttttattcgaagataaaccaaaataaataacagtgtagtaaaggctgtcctgtgggaaataactcctctgccccggtccaagacgtgttgcaatgccaggtacagtcccgaggcgagctgggcatgtttccaatctgcagccagtagcactgtactccgtactcttctgtacattgtatatgcgaaatacagatatgcaataataccagtgccagtatgaaattcaaaagagaaaaaaaagcacggatatacggcaaaagaaaccctccaatctcgggaaacttcacattgtcacttttcgattttatgtggatcagcggactgccttcgcctgcacggcacccggtgggtgaacagcacatatgtcacagtcatcgacatctcacagatcgaatcactgtcgtttgagataaccgacctaatgacctagactcaatcgcgtttcaattcaatcatcattcaattgcatctccagatctatatcgcttggaactaaatctttgacctctcggagttggtggacgacggcttggtcatttcaaggtctccggggcagacatggtcatagctatgaccaggaacacaggccagtggcgggtttgtgcttttggcgtaaccgccctctcacccttcgtgttcttttcaatcttttcttctctttggcaatcgcggattgaggccgatcaacttccaatgtttctttgttggccctcgaaataatcgggtttattcaatcgtgctatttctgaaaccgaacagggctttactggtctgatcatttctttgaccttagtgggttactggttgtgcgtcgcgggtgacagactgctcacagttttgccttgggtttctttcttttcgtttgcctggatcggaatcgactaacctggatgggatgcaccatggcatgcggttgattcttcgtttctgatttaggattccgaacacaatatgccaactaaaaaaatgcaagccgactaaactcatgcaagttgcatatcggtctagccttgcttcgggaattcaaggagtcagattaaccccggattaaccgatgcattcgccattgaattgcatgtctattcatttgcagcacgtaaactgattcctccgaggagactaattgcgatgtctaattctggcctggaagatatcttctgcgttattgtttcgatcataatgccacaacagttcattcgagaagaatcaagcaagagacttgaggtttcataggtaagcattttcgaagcggattacatggccattattgagagtctgtcttgtattttttggtaattcgagcaatggtctatctactccctatcctcttatcagacatttcagaccactgatctgtgaaaaggaataattgatcatacccgttgatatcaccctgatctcattaacattctagtctgatgccttgccttttcaaacccgaaggctctgtgtgtacagactcaagacaggaagcaatacgccatcaaccaagtgcatccaatcactcacaggaccaaccagttcatgttgatgagagcaagcaaggcggaaaacaatccaatagacaaggcgaactcccaacggaatagtaccgcactctacatgacacatttcgctcggagatgcagacacgaagccacagcagcacctccgacatcataattcggcctcgtcatggacataatggaacctcgcctttcccggatccgaactatctcatgaagcgactggccacatttccacctcgcagtgcggctatatgtacatttcccccgtaacacagacaaacgaaacccgaagcataagcgatgtcaaacccagccagacagagccaatggaacaaaaggaagtacagctcaagatattctataccacaccaatctaagccgcatcttgcatagccgtacctccaatgaagatatgatacctcgtgacacggagaccccgatatactcaaccaacccagatgcgattcagatggccgcgtaggcggggcaaataattagctgaagggtgatattatgctcatacccgcgtaagagcacacttgtacacttgtcaagcaggggttgggcctactcaatagacagactcgccagttgcaggctcccagcactgcttacttgcatacggataggcggacatttgttaacgccgttatgtttggaatttgtccgggctatcactcgtagatacatgtagaattggtatctaggctctgctattacgggttgtgatgcagtaggattggatgtgttattcttctttctagtttggtagattgcttatcttcgtgttatataagagagtgtggggtcctcgttggattatatatcatgctacatgtatcttattataagctctttgcaattggatataatattatcttgttctagtcgcaaatttagcattgctcctaatgtccgagtgtctgtcacatcggattatgatgtctcggttgatattctagcttatacgtaagtttttttgacgctctaggaagccgaagtcatatagctgcatttgatatgccacagaatcaatggacgaccctcgccctttcggtgatatgagcataaacgaaaattttatttatgcaatattggatagactaatgaaaagaaatctcttaggtttatatcacatttgcagatatccacattttttcttggttttacttatacttgcatctgaagcgctgagacctccactcctagcagattttcttctatgatgcgtcatatcggagcgggtatcaagtctccacaattagcgggtaatagagggcgaaaatgtgtcggacacccaacaagaactccgactgacacgagaaagaccgggagcgctgccgattgctcacatcagacgtgcgattaagctcccagagacaatgataggccgacccgggccgacgtttcctacgatatgcacggagtaactaggtcgatagtcagaccatcgggatttgtaaggctatagatgggagaaaccgggccagttatgaaagtggagcttcgaacttccccggattttgtcaaatatagctttggcgcgggaaacgttagagaatagcgtatttatgtggaacatagacgtgcgtataaagagagtccgtcggtatgcgggtaataccggttgagcgtcggagaatatcgtaggtcttgggaattggggggcgggggaggaaaggggaatatcgttcagcaaggtgagggatcagttcgaatatcatcaattcgaccttgagaaagagcgtggaagcgtggaagccaaagtcgtagcataattttaccccaaagaagaccccgaccgaccgagtttgaagatcgccggttaattttctcctcaccgggaaattgcttgtcccctcagttctccaattttagtatttcttgtcctttttagggaggtttaggcggttattcgagcttggacaggaaataagtacaagtttcaatggacgttatgagcttagatcttagagcagcctaactatccccgtaaatagcaggtgaatcatcgcagtggcagaaaaaaaaaagaggaaaatgtacccagtacctctgcttgctgcaggaagcacgcaatgggggaagtaccaggtacacagctatcccctttggtccggctacaccgattcgcctaaagcagcagcccaacaatggagcttatcaaagcttttttcttcccttcttaaattattgtgtcacccttgattttcatcctatttgtatttcctttactacatttggtgcgccctttcacaatggctggcagcacgctagcaattcgcaagatggctccgtccatgcagctgtcgtccatgacgcgcagatcgatgtccacgcagctggcccttcgcgcaaagccgatgcggtcgaccaaacttatccagtctgtgtcgcgcatcactcgtcgtggctacgccgatgctgcctcgaagcctaccccttcacccgccccgaagcctaagaagcgtttcagagctctgcgttgggcctggcggttgacttggctctccgccatcggtctaaccggtgctgtcgcatacagcatcttcgacctccgtcaacccccggaccaggcccctcctgacccatcaaagaagactctggtcattcttggtatgtatcggtcgcgattgtacccctacagccgacgtgtcgctaacgcgactgtgctcgttcaggaactggctggggctccgtttccctcctgaagaagcttgacaccgagaactacaatgttatcgtcgtctctccccgtaattacttcctcttcactcccttgctgccctcatgtaccaccggtttgattgagcaccgctcgatcatggagcctattcgaaatatcctgcgccacaagaaggccagtgttcagttctacgaggccgaggcaaccaagatcgactacgagaagcggattgtgtatatcagtgatgattcggaagttaagggtgatatctcgcacaccgaagttcccttcgacatgctcgtgatcggtgttggcgccgagaacgcgactttcggtaggattcactctcgcatctgaaacgatgcattttggactaatatcgtaacctataggtattcccggtgttcgtgagaactcctgcttcctgaaggaagttggtgatgcccaaaaaattcgtaagcgtattatggactgtatcgagactgcctgtttcaaggatcagaccgaggacgaggtcaagcgtctgctgcacatggttgtggtgggcggtggccccactggtgttgaattcgccggtgaactccaggacttcttcaatgatgacttgaggaagtggattcccgaaatcaaggacaacttccacgtcactctcgtcgaggctctacccaatgttctgcccatgttctcaaagcaactgattgactataccgaatccaccttcaaggaggaggagatctccatccgcaccaagaccatggtgaagcaggttaccgacaagtacatccaggccgaggtgaccaggcccgacggtaccaaggaacttgagactatcccttacggtcttctcgtctgggccaccggtaatgctatccgcagcgtcgtccgcgacctcatgtcccagatccctgctcaggccgagtcccgccgcggtctcgctgtcaacgaatacctcgtcgtgaacggtaccgacaatgtctgggccgtcggcgactgcgccattgccaactacgccccgaccgcccaggttgccggccaggaaggtgctttcttgggccgcctcttcaacaccatggccaagaccgaggctctccagcaagagttggagaccctgtcagagcgccagtcccacgccaagggcgacgaggagcgcaacctgattttcgacgagatccgtgagcgccagaagcagctccgccgcaacaagcagatcggtcccttccagtactcgcaccagggctccttggcctacatcggtaaggagcgtgccgtggccgatatcagctggctgagcggcaacatcgccagcggtggtactatgacctacctgttctggcgcagtgcctacctgagcatgtgcttcagcagtaagttctaagctctatccaacactgattgaaagtcatcattaacatataatctagctcgcaaccgtgtccttgtctgcctcgactgggtcaaggctcgtctctttggtcgtgatgtctcgcgggagtagacatatccacccggctctgatgaccttctgtaatcttgccaatcccactacattttccttttggatattcaatgccttccctgacacattgactgtgtaatgtgtcccgctacgccccccttatgccatccccaaccatccttctctttatttctctttgcacctgtgaccgtgataaacatattcatttccctttttttctcatgactcactgttggtgctgcgattggttccgcccagagacaaaagcattaattcgcatcttctttgtttcactttgggtttcttttcagactgtactgtacgctataggaatatatagactgggtttggggttgttgtatcaaacctgtcatttccatctgtgtattatctttcttccttgcacagtgtggtatcacactgcgtgcttggactctacctcttgctcgctgaacgaaattccttttattctgcgggtcaatatcacagatctggctcattgtcagccggaggaaggtatccgtcgccgttttgtactctcttgctctgcacgcgcacttccaagcttcgcacctccttgtgtcttctcagcccatagcccttaccaagattgacatctcccaccggcgatcgaagtcctcataccaagtcccacgcccaagtattctcgccgaattgcggccaaagataggcttcagtttatgacgagttagcttgatgacagtttttaggaggaggcctcatacattcatgtgtaggtcttatacttgccggccaaactctagtgtagctaggatttttacaaatcaagaatgaagaaaggaatagattatcaaccttgcgatgaatggtctatatatacattgacttcaaagcagttagagatacatactcccaagaggaataggggaagaagacggctaaacaggataaagaaagcgatgagaacactagcagaggtatcgaaactccagatcgagaagaaaaaaagagtgtttcgcacaggcagtaagggagaagagtcaaaaagcccaaacatcatatcttctagaaaaggttccaacggccccgcggttcctttccaggaggcgtacgatctgatttccgagcgcggccgtcaagctgtcggatgccttcgatcttctgcagagccagctccagcagctcctttttgcggatgatgtccaggtgacggcggatgcggggatcctcgcgggcaaaccgctcgacctcggcatctgaaagttgtcgtccaagccttgaatcaagctcacgcgggaaattatagtaaaactcagataggagctcgacgttgaggaatagcacggccgtggatgtaagtttatctgccacaacatctaggaacacctctgggcaatagtacttgttcttctgtgttgcgcattgcttggaccggacagcgagaagtctcatcttgataagatccgctcggtctcggaggaagagaccttctcgtcctagataatacatgtcagtgtctgtaaataaacgaaggagagaaataccaacctctcgccaacaaggcagcactgaagccacccgcaccgccttcgccgttgccctctagtactacttcgccctttcgcactcggtcgataaacgcgacaacgtcttggagttttcgctttccaaccgtgtcttccacatgcttcagggccgactcgcacgatttgagctcttcctttagaactttgcccgcgttatctctgcctttagcccattcaggatcttcgatctcaatctcaaatttatatggcttgatgcaattttcgacttgatcgctggtgctgaaaaacttgtcattcaaaataccggtgcatgcatcggtgatctgtttgcgggcaccagggtgggaggcgaacgtagaggaggctaaaagcgagtccacatgattgttgagggcattggcgacaactgtcgtagccaaccgaccaattccaagctttgttaatgaagaagtagaagcatcaagcttccggtgccaatatagggactcagcatcggcttttggaagatccttgagaggatctaattccagcagcggaggatctaagtcctcgactggcttgttccagtaacgctgtgccagaatgtccatgactcgctgatccaactctgccttaagcatctcccgaacctgcggtcgcccgaaactttccgcgaatgccttgaaggagtgcttgaaagcatcgaggctctcagccaagtgggactccgcgctcaaaggccgatcattatattgaaccttgaactcataggttgtctcttcaagctcttggctaatggcgtctctggttccagacaggctagatgacatggtctgctcaagaacctgcatcagtgttttccgtaatgtcgaaacaccgactgagacgtcagagtggggaccgaattcattttgatgcgcagagaagtaggcatgttcatttttgagaatggcgctagtaatgtttccagggcctctagaaaagagagctgttgtttgaggaatcctggtaacaacacccacgtaacctagccggagggggtattttttatcggaaaggacatcgtggccacgttcggggctgacaaggtccatcttcgtaatcacaccgatagtccgttcaccccgagggtctactcgacgactggctcgaagtgctgtcgagttcgctaggtcaacgtcggcagccgagatcgccaaaatgacatttggtggctgaatgtacctatcgcaaagatcaacaatcttttgcttgagctctgggggctgatctcggcccgcaacctgaatatatccgggcaggtcgatcaaagacagatccggaacattgggagaatatatcgtaagctgaatgggatcgtctgtgacacaatccttttcgggaacggcaaggttcaggtccgtgagtgtgcgctgaacttgagaaaaatccgtgatctttccgagacccagagccgggaattcaccatattctgcctgggcgttaggggtgttgaccaatgtgagctcgattggccgccgggtcaccatgttcgagcccttgggcaagaactcatggccgacgatagcctcaagaacagaacttttgcccgacgattgggatccaatcacgacaatcgacggaagagtgagcgtgccggactggccgatggtctggagaatattccggatttcaatcattttgcgtgtgagcagcatcatttggtcatcctccgcaacatctctctccggtcgcaaatctccctcccccgattgagcgtatccaaatgccgcagtagtagcagcggcggcggcagcagtaccagcccgactttgtttcggctctttgcctccaccaccagacgagtcaccatttctcgactcggactcctcgtcgaaacgtaggaccttctgcagccagtcaggcatttcgatgtttccggtcgtcttattccacccgcgttgtgtctgatcagccatgccctgtagcccttggaacaaggtcgaagctgtattccccgctgtgtccgaggcttgcctgaagacatccatcacatagttaccggcctctggaagattgaatcagcctgagcttctgcttgcagtgagcttgatacacgagatacatacgagttgcttggtattgaaaataagctagacccgcgattgttgcaccgccgaacatagccggaatcctgaaaagcttcaatgcaagcttcggaagcattcgagcaaatgagattgatcgaacagcagggacattgtggatggcatttgcacccactggccatgctcgtcctctgagagcagcgccaccatctgcgcgtagcaggcctccggtcctcgagcctgcattatggatatggcgagctagttgaccgttccgcaagagcggtcctagccgatgggagagtatcctcccactcattattgttgtaatatcattcaatagaaaatggatatgaaagtgatggccttaccggatcactgcacatgtgacatcaagcctaacttacagtccccgtgacctgcgcaagtagccgcgtagcttcccgtagcttccagtaataccaccgtcacgtgaaatatgacgtgctgtgcaagggaagtgagtttgctcttttgtgttgatttgataaaaacaatctttcctcttcgtgatctctagcaaaaataaagctcaaatatcttgcttttttggctgtaagatcgcgggtgacgtttgggcatctcaccggttcccaacagtcggtgactcttcttccgccccgaccctcctcatacatcctttgacaccagtacggccttgttcagactacaaatttggcttacaccttgaagctactagtaaatttggaagtggaatttgatacagtgtcatttccaccgcattgaatccaggccaaacatgtgtcgattcctggtaaggtccatccctccaagcattgggcccgaagctaatatctcgattagatttacaaagggcgaaatgagatccgtctcagtaagctgataaccgagccaagtcattcaatcctcactcaatcatatgattcacgcctgagactggtaagtacccacataattagcatatcgcaacacgctgacatgtaatatcaaggacaatcgccgtcctgtcaacggtgacgggtttggtgtgggcttctacacagaccccaagcttggaccagaaccttgcatctttacttcaacactgccggcctggaattgtgagaatctagagcgactcgcttccaaaacatgctcaaacctgatttttgcgcatgtacgcgcaacaaccgagggttctcttgccgaaaacaattgccacccgttccagcaccagtccttgatgtggatgcacaatggcggtatcggtgggtggagctacatcaagcgtacgctgggaagctcactcgccgacaagtggtacctgggtgtgaaaggtggcaccgacagtgagtgggcattcgccctcttccttgacttgcttgaaaaggaaggagtggatccaagctctgaccccggccctgagggattcgggcaggctctcctacgtcgtgttttgatgaagaccattgccagaatcaatgaaatggtcaaagaaattccaaagaaatataatgtcaccggagtggagactcggagtttgttgaactttgctgtgaccgatggccatactgttgtttgcactcgatacatcagcagcaaaacagatgagcctgccagcttgtatttctcttctggtactaagtggaaggaaggtgaaacgaaaggacacttcaagatggagcgacacgataaaggtgctgatattgtcctcgtggctagtgagccaatcacatttgaacgacgtgagaaccctttctctctctctatgcctatgaacatatgctaattttatacgtagacaattgggtgtcagtcccaacaaattcagttgtcacaattcacaagcagactgttatgcttcacccaattcttgatgaattctatggcgaaaacctcaaccacgaccgatcttcctgctttgctgtatccaagggacttgttagcaccgctcctgggacaaccgttcgaccaacgaatacgcaggagtcttgcgccccttcagcaacttgcaatgctatcggaaacaccaacagtggtatggaaagcttacgatctggtcatgttaccgaatgtgccgtgtcgtactaaattcggcatcgagccgatcattcttggagtctactgtgaggttcagccagagacttcaaagcactgtcttaatatggcgttggaaagatgaatatgccgggatatctgagtcaaattggagtttatgagttggaatgtaagcgtttggggttgtgtggtctttcgggttatataatttgcagaattcgaatgtaaaatgaatgtcaaattgaatttggagaagtattaactactcagccaagagtagaccacatggtattcatacaattggaactctgaatccatgattccggtttgtttgtatatatataacacccggtcacgtggttacgtatcatgacgtaacttaaaatcaaagtccacaggtggacctaactaactagtcaggaagaccgagtcaggcatcatctgcttggttaaattactccctaactctctatgtctatttcatgaacatggttgtctgagaatcttaaaatgaggaagactttactactcgtctttattcacggtttcaaggtatgcaaaatgcctgcttgttgaagacctggtccccgcaaagaattacagatttcagcccaacaagatttgtttttttgacctagaacttacgttgactgataaaatccaattctagggcggcgatgatacttttggcacgttccctgagtatttgcgcgttttcgcaagcagagcacttcctgcggtcgaggtcgccactgctgtctaccccaagtatgagactaaaggtgacttgaaagagtgcgtggcaagattgcgagattggtaagactatgctcagctcctcttgtgaacacatacaggttttacttacgacgatatctcttctgtgtaggttacaagatactgtgattgatcttgaagtagccagccatacggcatcacccaccgttgatccctcggtccatgtcgttctgatcggtcactcaatgggaggaatagtaggagcagatgttctccttttgctagcagcggaacaaccaattcctcgaaatacgcagccagggttaaatggcatcgaatctatcgtggaaccgggtactttcatgttccctcatatacaaggagtgcttgcatttgataccccattcttgggcatagcgccaggagttctgtcatatggcgcagaaggacactatcgtactgctgcaaccgcctacaataccttctccgaggtagcaggtctgttcggttacggtgggaacaatgcatcaaaccaggggaccacccatgcatccccgaaagagtcccccaaaatgtcgccttccacacccgacgccgccgcgacaccttcctggcaacgatggggtaaatatgccatgttcgctggcgcggctggtgctgttgccgctggcggcgcagccttatatacgcaacgccagaagctcactgacgggtttggatgggtatcatcgcacctcgagtttgttggttgtctcgcgcgcacgtcggaattgcacgagcgtctcctgcgattgtcaagtctcaaggaggaacgtggcatcggatgtgtgaacttctacacatgcctcggaaaaaatgcgactagtcttgtggaaaaaacatcagcaaacaaaacatccttcagccagaaaatcattaggtcgaggaacaggaccttctgttcattgccagcagaggtggaacgtggcgagggatctcaaagtccaggacttttgtggaccagggcagttaatgaccaggctactgacgaaacaaacgcacatattaccatgtttctgtccaaagagaatcctgcattttttgaaatgctcagggaagcgtgtgcggtcttggtcaagtcgatagacaaaggctggtatgattcgtccaccgaaccgcccaagaaagacgatatcaagcaaccacatgcaacagagggcacaaaaaccaaaacagacggggacttcatggatggcgatgacgttgttgtcgttgactgagatctgagatctgagatcgcaaactctaattcgacccacaaatcccccagttttcgttaccatagacgttctacaagaactctactccgtacctatcggacttcccctggtcggcataccacttacttagacttcgcgtgcactgcaccctagcgcacagcgaactacatgcaaaagattcgatcaccatatcgagatttacctccacaggcaaaactcgcaatgggccttgatcgtcgcgcaaagtccagaacaaggcggtgcggtcgtattcactccgcttcgactttctgagcagtcatacccgaagttttctcagtggacgttttcttcgtttgggaacatggcagtgctgatcctgtgtcctacttgttccactctctgaacgattgtctgcctactccgaagcgatcacacccttgaactggtatgacgtggtcccgagatgttggggatttgcccgggccgttttgcattattataacgcatggtaacacttcaaagttttctcttgcgattcacattagtctatagcttcttgttatgtagcctatccctgagggtctgacgcctagacggtttgctgaggggtgatggacgtcaacttctttccaaacaaacttgtcgctaggtcgaaatagaactctcaattctcgtatattgtttcaatcactagtggtaaattgcgtacagttttctctatgccaacacttgatcggaagagcaaaaagcaaaaatatcttccttttattgtacccctacgataattgataatcatccatgtaattagtatatgacgatgtaacttatacccttgctagaaagaatgccctagcgcgccgatatggtggaagcatttggatagccgcgaaaaaatatataaatgagatatcatgaagtcaatagtcacatatacagcgcttgaatgaaagaagaaaggagcgatgaaaacaagaaagaaaaacacaaggaggtaaggaagaagggtcaataattatgatgaccgtacgttgaagagcgatggtggtacaggctgcccgcatactcggagttattgtcggggtagaccgtagctcggcgctcttcctcggatagaagttccttaacctcccaagtgtttggcttgacaccgacggagaattccagatcctccttggtaatcgagtcccaaaactaaagaaagttagcaggaccaacgccataggcgtgaaacgtgaacttaccttgtagaccatcatgactgcgaggagattgcagaatgtagcaaagaaaaggccgtccaagtaatgctgcacgttgttgcagataacgtcactgaatgcatacaatataacctggccaatgatgaagacgaacacgccgaacgagatatggcctagtggccagcggtcatccaatgtgttcgcaactaggagcaattgcatgatcaaatacacagcgatggagatggcgttcagcaagtagagcaccacgaacaagccagtggtattcttgggacccatcgaaccccatgacttgaaagtcgccagcgaaatcagaaacgaaagagcgaacatcgctgcggaggggactcggatcaaccaaacggagagggctgtgccgtcttcgtacagctgaaagccgacgaacccgttgacgagaagacaggtgcatagcgcggatatcaaaccgttctgaacagccacgaagtacgggaacgggccacttcctggaggaacgacacctgcatcaataagaagcgagaaaagtgtcagagctaggtagatgtagaagaaggtgacgatctctttacggcctatttgtagtgaaaatgtcagctagtttgcgccgaatgtgagtgaggaggatgccagacgaaccgacggcagtaaacttagatcgaacgtgcaaaatcatgatcactgtcatgctaagcgccatgatatgcataaaggacgcggcgccctcgaatataatggtattcgcaacctcaatattccgcgcatagcagttagatatgatgccagttgacccggaaattgtcgatgccgggcccaccaaggagcacaaaggcacgggcgccttctcgcatatcgtgtcgaactgaccgaaccccatgatgtctggtcactaggatattgagtagtgcgacaacaaacagttcaagttccagtcgcggcgggtcacgaatgttgagtggacggtctccacaacgacgggggtgggatggtggaggagatgacggtatgtgcctcggtccccaataacagcgtggctctttctgcaccccagctgcactatttaaatcggctgatgcccgctgacagccaatgtcgaaggtcagatcacccctgtgtgaatcgttgatgcgaggggaagtgtctcagttttcgctttcaagatcacgggattggaatcgcctttgtaggtttagcgtcgttgctagggtggccccggggcggaacctggcttagtcattcggagatcggaaacgctagatccaaaatggaatagctcgaagagatctcatgtgactcgggtccgaactcggcccaagccgaactaccacgctagttatgtcaattatacattaaggggtcagggcacaataacacaccatccaacccaatttagaaagtcgactagggaccgttgggactatccgcatactgcaagctatcttatctactttttcggtctccacaagccgttggacttatgtgatcaagacgatttggtgctggtcatgattattggactgtagtctacggagtcaaagttggggttagatggggtttgtattgggcagttcacctttttcctttctctttctcttgttattgaattagacttcctctgtatgtggactgacctcttgtctccacacgaccctacaactggggcattgtcgcaccatcgtctactttgagactagggtttaccaatccgaggcctcacagtcatctgttcgccagaccagctcccagttaggtgattgtctctatgaatggatacaacgacgcaatcctgcagatgggatggcttgatcttgatccgagtgaatggtacattttgccacggacaaatatcgcctatgcagattgcctgataatcggcttccgagtcttcggaagcgattaaaatgaaaggtatccattgcatcaggtttcatctatagggcatgggttgagatcaagtaaccttgtatcgatcccccttttcttttgacttttgaattctagcgtatagatgtcataatgcggcggaaagccgttttctatataagctccccgatctttttgatgccatcaacgctactacactgatttgtcaatctgcttagaacactttatagcattcctcaggtgttttgtttcatgtataccactcatagtctgattgtcgaacagtctttgcaacattatatgactatcaaatgtgggtaagtcccgtcgatcctcatgtggcacagaggctcagacgcaaagctccctttttgataagaaataaacaaagaaaataaattatcggagcttatcaccggctccgactgcccaactcgtcctttctccggttttccaacaggcccaatcttgcacaatgttatactatcgacaccagactatctcccaacaagagaaatcctccgtgttcgcctgacccctggctagagagaaaaaaaaaccagaataagcagtgccaaggtgtttgacaatttggcttaaggtctcgagatttaagagactgccgaagatatttgtctcatgcatgaagatcccgactagcgccacgtgtgaatttaagaagcatcaacggctgcgaggaaccgtgtcgatctcccatctacccgatatttgcgatgttcgttctcgcttcctgacagtcccctaaacagaatattaaaaggaaaccaaaacaaagcaaaaacgctagaagaattcctctcaacggtcatacaagttaaagcctctctttatgcaggacccgctttcttgacaagggttttagggggtggagatggtggagagaatgccgtgcagtactcagtactgtatactacatctttacccatcctttagggatcgaaggtaaatttcgtttgaatatcttgggttttccattaattttatttaattttcggatttttatccttttactttattttattttatcctgtttatttattgccatgcccttgggcgtcatgacatccaccctccaaagcaaactagtgactcttatatctagtcgagcctccatctatatttttccgatttcctacaccttcaagattgatatctcatccctcacagttcaatctattacacagtgttgattcttttcattccatttactatctccccggtcatacttccatcgcagctggccagtttcacagatcaaaacccccctcgatgggatcgaaatgtgcaactttttcaaaaacttttacatatattccacttgctccaatcctgccgcccacttcctccgcaccgaaatggaggggacaaaagacaatagcacttgcaaagacagtccacacgaccgattcattgtggtggtgggcaaatgtgtactctgctcgtctgctcgatgattgcctaccatcattcgatacttcgggcctcagggtactcgaaataaaaatttcacctctgaaactcggtcaagggcattttctaaagtttaccatcccgcttcctcctgtccgtggtccttggcatgcaagactccatccaggaactatgtattcggggagagccgaccctccaccgataaacgcggctttctgaaaaacattcaacccttctctacgtgactatgatcgacaaatttataaaattcggcttctttgatttggatttgtggggcaaaccgtgccggtttaaactttgcttcgcggtcgacgcgttctccgatactttgtattattggcttttgaagcgttcatgtcgtcccgtttcattgtatctctttttccctattgtctttgttagcgtctggtaccttgtttgggagtctggtgggtttcatatatgaaacttagacgagtgaaccttctgatttttcaggctttgattccccgatttggagggtttgccctaactatggttcacttcaatgccttggtatgatccgagagctctttgcttctaatggacagggagctggaaaaaaatgtattgtacaagtactcaaccaattttcaattggtccctaaatcacatgcttgttggaatgctcatgcacgcggaacggatatattttctgcgacttctctgactggttcccaacaacgttcgggcccaaccgctcacagataggtaatgcaatccgttcaatctaactctctaggggccacatgcgcgacgtggttgatctctcttccatcacattccgccatgtctaggccaggggcaaaagggggtgtcctaacacagtgcggaaagacaaccgcgcacaagtaaaatgacaacaaccaagtgactagagagagattaaggtacctatgccgtaaaatgagcatcgaatggaggactcctatagttcctgtagtagggtcactatctacgaattccccctcgagcagcttcggctggtccgcttacacaagggttgaattttctccccgatcgagtccgtgcttttccatgataggatggacggaaacatgaaggattggaatcaggttttcccatctgttgagccatactacagggcatcatccatggaactagggacacccaacacagagcgaagaccacgcaatctctgcttcggaagtaccgattgaagaagtagagattagatatagtacacagccctccccttgcagggatgttatagtctcgttctagccatttgtgttctttgcctaagttagcttactcttgtcatttatacttgcgtcaatttcaccatactttcgccttacagccccgttattttcccccctggaactatattataagtccatgcacgatgccacgtgtaatctttgtaagggacctggggcaagggttaaatataggtagaggggtgaacattcataccccaagaccccaagaccccgagaagctattggctcgttctccctgggaaacacatccatgggcacataagagcttggggctttcgtacccgaataacccgaggtgtggatccacggctgatagatgcccttccgaaacagccttgggggggaccggcggtccacgcgtccgtccacgggtggtgtagctgaatcagtggagtgaaactaggatgcatccatggatcgtctattgcaattatttggaaccccacggagtaatttcctggtcgaactacggagtaaatatacggagtagtactccgtactccgtagtacaattgaattcatcgagaaagccctggaatctgctcaggtgaaaatgtgctcagtctgtttcacacgtgcatatttcccaaattctctttcctattagcgctagttcgagattttccggaaatgaaccgactattagagtttccgttggctttttttttttctctcttccacgctaagactgcggattcctctatctggactgtgttctgctaggccactgcgttgtcctgtaatccatacatacaatatgtattaactatttgcttggcttccgtcaattaacacagaaaatagctaaggcgttggcggtgaatgagcttgtgcgccgtccgtgcaataataagctgtgataccaatatcattgcgtatatagggaggagtacaacgtaatttatacactcacagaaagccaagtcttgttatttgttgtaccacccctgaagattatagttaggaactatgccgacggctgaatcgggtaagtggcacggataatgatctatggatcaaggtcaaggtggtttgtatacaatctacttcatatttattccctttttttgtcagggtttttttattcgccgagcctataatttatattacggctctatccctaattcaaaattaaaggtatgatgtacacggtccctcaaaagaccaatgtctagaacgttatgctcaacgcctttctgctaggctaacgtggcttgctttttcacatgttcatgaatactaaacaccaattgattaccatagcttaatagttcaacaaccgcggcggaaataaccacgaggagatgatagccatgattgtgatacgcgacatgtctataatttccacgattgagctaccgacaggggtctcatccttttggggggagggggggaatgcgcatctagacctgtatggctcattagcctctagaaaaaccgtcgactcggatgaatatcaatctccaaaatagaatattagaacaggtcgcacgcccttgttcttgctttatttgctcttgccggatacaggagcgacgaactgagttgggctggaaaccatgcgattcgtttatcgctgaatatttttaatcggaacgctttttcccctaataaaacactaatcttatttcctccgataggggtttctgatattttcttgattttatttgtatgttgtatggttcccttctatgatcgtgttgttctattcaattagactagctcgtggatatgaggcttagcatgcgaatccaacgagaggatgtcctcgaagaatcaattgagtaaaaattggtgattgatgtccaaaaagcccacttctccagcctatgtatgtccccggtcataatccacgcaccacgtgcgacttcacgttttacactatggacgagatatctgagccttgttaggcataatatcaacttcggcaacccaagaaacgtggccagatttaataacagacacaaaatagccaaagattatggcattaacaactgttcgtgtgcacatcgagtttttaaggttgagtcctgaagccacaaccggttacataccgggttgtgcctgagctagatcatgaataccagagcaaagtgatttgtcggcagtaaggacgagtcccggcatttctaccaatccaaactagctaaaacatctcgtttctttgctgagatggtaggcaatatccaaccgcgtataagcgtataacaagagcacaatacaacaaaatcccaaacagcatgcagaacagcccaatcaaaccacttttcacccaaaccttcaccccaatcccgagcccctagaaacgcacctcaggccgaataacaagcctcttgtgcacatatggcggaggaagagtagtatatctcacgcaaggcttgcacgggagtttttctttcgaggaaaatggcaaacttgggagattgccaagatgtagactcagaatcgacgaggctctcttccgatcaaagattcctgatttagagcctagtgtcgaggctgagggagttggtgtatggcctggcgtatgctgtggcaagcaggagactgttatcagactccgaagatggtagaatgattcttcctcttcctcctcctcctcctcctctttttcttctggttgttccagcttaagttcgggtgctgctgatgggggctctgctatggcggcagccactgatgatagggcgctattgctcgatgtgttgctcacggtagctgcaagagcagctaattgattgatgatttggtctgcttcgtcgtggtgtcgtgttgtagtcatgattatcccagtttgatgaggttctttatcttgggatttgagttcttgggacgtagttggggaagtggaagatttgttcgtgtctgatcttcgtcgtcgggtccatagatttcttagcagagggagaaacatggtaacgattaaagaaaccacttaaaaagagatgtcagcttgtccagtgtctagatatgtcctcggagtacgcacagttcaagcgactaatcaatattgaatttatcagttatccaaaatccttcaaatctttaactagagatccgatgtttaaaatctagggttcccttctaaacctcagatatatatgtcctcggtcaacgcacgagcttgatacaatgaagggattcaacgagcaagactccgaccagtcggtgcaatacaaaccagactggatctgaaacaccacccagaatccgggatgatcagatatttcccggaagactaggccgttagaacttcatgaatatgactggatgagcttaaaatgtggattcggagactagtactgcccctctcgtttaggtgcatcaatataaacagatcaacatgcaagcatcctaccgtacggaaagaccctaccgaagagttgatagatcattccccaaattggagtgttgcaaacggatagattagtgcggatgtgtatcccgtagatcactatggcaccacattgccacaaatattagattcgagtaggttcgagctatcttgccccgtttgtggattgagagatgggtgggtcggatcgttagggctggtttataacggggccggagttaagattaccagggcaaattaaaccatcaaattaaaggatatgtgtccatattcttcgaatgtcattgcggaccggtctatgacatacttcgaatttggccatggaccgaaatcgtaatatgacctaagcatgcaagccgagtcatagaagcaaaagcaaaagcaaaggcaacagaatcactccgtcctcggatcccggaccatgcagtacaactaccaacaatcaaagtcagcaacaacccaaacagatacgagccccacaagcaaacactaccaaacaagtacaatgtacataccatgcaagcatccaccccatcccgacactccatctccttactcatgtgaaagcccatacgctcatagatcgccacattaggcacattcttcgagctctcgaggtaacacttgattccctcctcatccgcccgtttcgtaacagcctcaaacaacaatctcccgatacccatcccctgcgccttaggactaacagcgacaatattacagaaatagtacccgcgcggatcatcccagatagaagcctgcgcctcagcctgccgctgtttccagatccagtacctgttcgtgcgcagcccgccgcggccaaagtaccggatgttgttgagcatctggctgaaggatagggcccatgattggaaccaggagtaccagctctctggttgcgcggcagggtggggcgctagccagcaagagaccccgaggattggggctggggttagtgtggtgctgtgggatttggagtcggtctcttgggtttcttttgcaacgtagaagagtgcattcttgattccccaatggcagcgtgctgcgagagaatcgtagtttctttgcttgttgaactatacgtggagttatctctcaggagacgtaactgccggccaagttgaccgcgtcacgagagagatgtatgttagtctgataataaggagtggatatatgtctttcttcttttgcttttggtagcgattctcaacgcgcgacgtaccttggatgaatcgaaggcccacttgaaataagggtcgtctgcaaatgcctgctggattatctcaataacaccggggatatcagtctcggtaagaggcaagacttcaacagccataatggcggcttgggaactctgtatggcgggtagatgaccacaatttaggcaaatcggaagagataattgaaggagacaaagaaaaagcaagtcatggcagttggggaaccagacaacctcgggaatgtggagagagttggatgcgccttatcgctgacacatcagttcttatctctagccctgaagggctccagtgccagtttttatgagagtcgggatttcctggaaaggtttgataggtttaatacttgagatcattattcagtttatcacatgtatccatataaggtatctgactaaatgacccatttcgccttttgtccccgatcaacctcggggaatgaaagtccagtatcaacaccagccaaaaagtatagccgttcatacatgaatcataaacaaagtgctattaaatggaaagaatataaatccaaatataacccagagaagagaaagagaagaagaagagcccaaactcagatctgaagaatagatagcatagctggaaaacatgtgcctgacaccaatcccaatatgaacattagcgtaaattcatgattcagacctcgtgacagctttcttccttttttagaaaaaattaagaatagcagtattactggaaatagtcttcgagtcgcacccattcgcggggcacgtccatgctgcggttgacgcgtccacccggcgtgaggggtacatcgacgcggccacgaccgcggtcatcgtcttcatgctcttcatagaacgataaacgggagaaataatcctcgagaacggcctcccggtcgtccccgacaatggtatcgtattctggaggtggggtgacaagcggtggcgcgggagggacgtcctcgaaagcggggggtgcgtaggagggcgcacggagcagatgcattgggcgaggtagggtaggtgtgttgcggtcgtttggtggtgttgcaagatgtgcttgtggaggccgggcgagaccgccagaatcgttggtgaagctgcgggagaagttgtggcctgttgagccgcggcgaacgatggttcctggtgtggggcggctgtcttcacgatcggatgatgtcgctggggcgatgacttgctctcgaggtgcaggaggtgcgccggggcatccgcattcgaattcttgggctggggaaacgggtacttcggctggggttgtgtaggctggtaggtagatgttggcctgcgtggccttgcaggagaggatgtggaatggcgagtctatggagatttcgaaatgtcttcgtttggtggggtctctttcgtcgatcttcgaaagacggaggacaatctgcgtggatcgattagtatcattataaccaaagaaagaggaaagacttgacatactttgatccagtggttgatctgaatgttttcgtatgtggtatcgaaatgcagccgctgaccctcgtccctgcccttcatttcgtggcaacttggcaattgcacgttgaattccatctcagttggaccgacaccagaatcattcgacagattgcctagcagattcgtccgattccgatccacaacctcatccccccttgcagcagcagcgcggtggtcccagtcgataccgccgcctgcagtgacacgcatggagctgccaggatacgtgctgacactagacgagtctgctcgtttttcgaaaagcaacaccttcttcgctggttgcaaccggtgcacgctcttgtctgctgtccagtgctgaatgttctccgtcacaaagaccttgattcggtggcactctactttcgctagcggagttaacttgaacgcaattgggatctgtgagcccagcgggaaggacttccccgagatgacgatgtcgtagtgaagttggtcttcccagttccgcgaaatcgcaatcggctcgacttgctccaatgaaccctcggcaggggtacggatcacagggatttccatggtaccgaggagatttggtcggaatgcgcctgatcgttccaccattgcttctaggtcgtatctcacagagcccagatccgttttgattgtctctggcaatgatccgtcgattggaaactcgaagctgtataaataatcgcctacggggaacatgcggtaatttcgctgtggctggggttgcgaagtcggaggttcgttcttgctgaagctgcgtgaatgtccgtggttggcttgtagagaaagacgtttgacttcgcggggtgttggtagggcgagtgaggcggtagaattgcgattggagaatatatgtagttctcgagttgtcatcgtcactccctccttgcctggtacggacgacaccggtttggcatgctgatagtaatgtgcgccatagtcattctgcatgagcgcggtgtcaccgtgattgaaatagaccacaccatgtgtgacgagatctttcttatcatggaagtggatcttcctaggaggaatacctgaacaatgttagctcatgttcaggtacaatttgatgctgtagattctcaccatctggccaatcggtttgggcatggccacggaagcagatcgagatcttcttgatcttgacacatttggtaatcttcaaatgcatttgcccccgcagaattgcagactttttactgcttgggtcttgctgatcataaccctgcaagaaaagaacgggttctgtgagggcaatcccgacagaaatgccactcccagtggctacaatcttctcatttcgcaagggagtaaatggggtggtagaatcggtattcacggtatggggttcatgtactgagcgaggcagcacctcggtggacgatgaatccgatcgcatctcgtcctccaagtcgaccgatatcggcgacaatataatctccgaaactggtcgtacactaagacgttgcgaaggcgcctgaactccagacgaccgcaagcgaaggaatcgctttgcgttctcacgtgggcgcgccagctttttgaagattgagtcccgacgactccgtttagggatctgattttcaatacaaaccgtgtggcgacgaggcgagcgagtgatgagattggaaattgatactcctagcgatggagttcctgtgaactccgagggccgagtggggttgctagaagccgaccgagaagataactgcgctggcagaggaaggatattagcacccatcatgatgttatttgtctgctgagcatcgccgaataattcccaaaattgtacgtatatcccttggatacgcttgtcgccaaattgggcaaaacacaagcctggtcttccaacaagaaagggaatacaaaagtgcagggaatgtgttagacagattcaacataccttggatctttaatcttgtgagacgatgttttcttttttttttcgtcccttgaatcctttcacgcaaggagactgatctttgtaggaggatggaattctcgggggtgctgacttcataagcaatcctccactctgatcatcgtgcagatctctatttcgacgtgtaggattggctgttatagtgcggaattgtggctccttttcccttttccctttttccttgatctctatgactccgctcacaaggcgtatgtggcgtcgtatgtgattgaaaaaggtccgtgaatatagttagaaaggcgaactacttaaactaaaaagagtcctgatccacggaagcgaaaagaagaacctgaaaagcaaaatataaggtgccagaggagcagcataaatccgaactcgatgacaacaccattgagaaagccggggggagagacggagcctggtctcatatccggcgatccgggccatacgtctctaccatctacggtttacggattttgctcggcatttctgtcaatatttgtggagaaacattccattggggtctagagttataaatgcctcggatctcacggcctatacaaacggcttcacggattcacggcatagggcagtgctagcgcccagctcttggatatcttggccttgttgatctacataacaacttagaaaactgcatctttagttgcgctttaatcactctttttatgactttatttgatacgtttaggactttacaccagatcccatggattttgaaaccataacaaatatgatatgaacctagacctttgcatttcttaaatcctcgtatatcatcctccgcatgacttacttatgatttccgtacatggctagttactccgaagttgactaactacctagttagttagttagttagttacagtaactcgttcagggcctgattttcaaggttcactgcacggcttacacagcttagggcttaggtggaatgtgaatggtcggaagatagaccccgataaagatggtgatcagttctagttcgtcaccatcacctatgtgctgtacatcgtaggcacatcagactattatactaaatactactggcgtgacgacatgtccatcttacgataatgacctcatccgccaccttatgcctagactctactccgtacatatataatcgtatagagcagatctatttcgggaagcaaatgccttcgttctctctggggtgatcgccctgtggacttctctgccctgatttacttccccacgagccgcgtcgatcttgaactacgtcactagacgtatagactacatagtatatttagtggcctagggatctcttcccacaactatcttgtaagcacgtattttcctagaacccaaatcaggcacagggaaacacggtcccgattcaaatgtcctgtcgcacaacgagctctgcttcaccactggaagggttcatgcgttcggtggaggctgtctaggagctgtgggcctggatcatggtggtttcactatcttctttcgaagtgtcagaactttccttattttttaaaaaaggtcaaaagacattgattctccatgaatcatactcctaagagctattagctaataattgccgtatgtatcattaatgttccacagcagctacccagtcagggggagccttgaacctgagtaacaacagatccacgtacctagttcataataatcaatgcttccagtcacagaatcagggcatatgccattagatttatgcttagtaccactagtgccaaacgcgaacgcatgcagctagctcataggataccttttccccttcccccaactcccccaactcctccactttcccctcactagccgttgctcttatccagactgtatcaatcccaatagtgtgcccctcattttcatcagttgaaccaattatcatccagctcattacatgcgttcatcaggctatccccttccagctgattgaagtccccattattctctccaaaattatcagtgtccatgaacaaatcgtcgaagtttgattcagcgggccccatgaaatcctccccggagttaccctgtagaaaattgccgtcatccccttctgtcttctgtaactccatatcaaatgcaccaccactagcagggacatccgaagtattccccagaggttgagtcgtgcttaacctgtccgcaccaccagcagcgccggaggctgtgaaatttgacccggataggaaagcttgattgcccatgtcatcatcgttgaagtctaagctaagaccaaactcgtttgtgcccccagcgttgttgaggactgaatcaaaagtgagatcttcattgggtccagggggtgattgacggggagcattgttatcgctctcatttttgacaacgacatcatcgcctgattgggtgtcgggcttgatctctgccgctgattggctcacggagatagcttcttctgatttaggcatagtttcaagctctgtgcccatttcgactttctcagtcgggggaggttgaatgtcaggttcaacctgttggttcacatcgctcattgtcacatcttcgacgggctgaggagcggcactagtggccttgagagcctcgtaatccctttccaaaaaggctttcgcgatgaactgcatagggtcagaaatgaaaagggaacccgaaaaaagcaacaaaaaaaaagcaaaaatgagtatatttgagattgttgatatttactcacaatttgctctgataggttatccaaggcattttggaagctatcatgatacaacggaatggatcgttgcagattgattcgcgacggcatggagccagacttgcgaaacaaacgaccggtatcaatgagctagaaggtgtcagaggctatatgccaagagtgatgttccagagccagcgcttaccgtccgctctattatgcttgagagctccgtaagggattccgggtttgaataactagttgaatagctggccatggttagaatatgggaatgtgaagacgagtagtgtagttttccaactcggacgatatacaagttgaaggaagaacttgggagaagttaagaatttggggagaccggagagtaaatagactaaacccattgaggtaaagtgtcctcccccccacccctagcggttaacttcctccctttacctttgctcttctccagttccttttttttctttctgtatcctcaacttctttccagttccctttttcctttttctcttttctttgtttggctttcccctgtaaagggacttgcatttggttttcttcaagctttctcagcctcttttttgttgggctttctacccttccaacgcgctttgtatcgtttcaaacaaatctccgaccgcagctttatcaggccacagaaacatctcccttattctaccggagctggatcgaaaaaaaaaatccaaaatccaaaaacaaatccccccccctcaactcaggttccatctcggtgtctctgttactagcactgtttatacccggtgctctttgtttccccatcttaggaatctttcttattggacttccatcctggtcccccgcggcctcctataccacgtatatttccccggtcttatttgcgatagtggctttcggcgacgctctgcattgtctcaaattccgaatttgacagatcataacactgggctctcccggtctgacatttaaccccgtccgacttccgcatctttagcttcctctgatcgtctttgggatatatccgtatcttttcaaaaagcaatcataatggctgaaaacgctcaagcctcgaccccctcgtctcttccccccgcgcctcaacccgctgtcggtcaagcccaacagtacgatgctcctcagggcaatggccagggcaaccagtcccatatgcccccgcccccgcgccccccggtgataattccccagaataccaatccgattcccaccgccatgacctctcccatgtccggagttgatatgatgtcccccacaagcgctggtggatatgtccgccgagcggctcctgaaccaaacaagagagccctgtatgtgggtgggctggacccgagggtcactgaggacatcctcaagcagatctttgaaaccactggccacgtggtcagcgtgaagatcattcccgacaagaatgtgagttctcctgacagacagcccccctgcatatccgccccctgagttgttggaaatgctctctggagctcttatctgggataccattgctagtccttgatggaatactggttgctgactgttttactcattccaggggcaattcaccaccaagggccacaactacggtttcgtggagttcgatgacccaggtgcggccgagagggctatgcaaaccctgaatggtcgcagaatccaccaatcggtaagtttcctttcgttcctggtattctgtggctgtatctaattgcctcaggaaatccgtgtcaactgggcgtaccagtccaacactaccagcaaggaagatacttctaaccacttccatatcttcgtcggcgacttgagcaatgaagtcaacgatgaagtcctgactcaagcattctctgcttttggttcagtatccgaagcacgtgtgatgtgggacatgaagactggtcgctcccgtggatacggcttcgttgctttccgcgaccgcgcagaggcagacaaggccctcaactcaatggatggtgaatggctcggttctcgtgctatccgttgcaactgggccaaccagaagggtcaaccttcaatctcccagcagcaggcactggttgctatgggcatgacgcctaccactcctttcggacaccaccacttcccaacccacggcattcagagctacgatatggttgctcagcagactccccagtggcagactacttgctacgtaggcaatctcacaccttataccacccagaatgacttggttcccctgttccaaaacttcggctatgtccttgaaactcgcctccaggccgatcgtggctttgcattcgtgaagatggattcgcatgaaaatgcagcctctgcgatatgccagctgaacggctacaacgtcaacggccgtcctctgaagtgcagtgtaagttattgctattcctgtgatttcccggcttatttactcactatcgcagtggggtaaggatcgtcctcccaccggccaattcgacaacttttctccccagcagggcaacgccgctcccttcaacaacagccctgccggtttcttcccccaatacggtggtcccgcgaaccccatgaatcaaggtgagcctagtattcgtcgtatctctcggcactcgcttactggtgtaataggtcctgcccctgctggtcgaggctgggatcaacaacccaacaatttcaatggacctgctatggctggccagggctacgcccaggcaggtaatgccgggggctacggccgtggccaagccatgtccccgtccggcaactgggaccaatccaccaacttcaacggaggctaccaggcgtagctcgggttttgacagtctccagtcagtctgctcacatacgacacttccggcattttctcacagaactaagtttatttaacgtcctttctgtgtttctttccatagcacccttctacaattccccatcaccgttgatattttctttcttttacctaaattgagtggattttcaagcgagcaagttgcttttgtctgaaacggaatttgtgtgttgcgcaccccataccccaagtccactatgttgatttgatttttctctttacttcttttttctttttcttttccttaagcgtgccttgctatcaaggattctttggacttttgttggctccgtcacgcccccccaaataaaagcgacctccctactcttcacccgcgtatttggactgttgactgtttgttcatttcatttctctagctgttttatcattcgagtacatttgttgtatcagatttgcttccctgtcttttcttaggcttgctttctttgttcgatactcattccactcaaaagatgcttttcatgggttgccatggattcctcggttgacacattggtctgggcactttcccacgagtatccgtatatgctgtgatgaatttctttggagcacgcgacatcattgatcttttttctaaatatctctgccttgctggcgttctagcccagataccaatttgcctttttttcccctgcattttgcctttccattgctttaaactcattgccgatggcactttctttgtttatttttatatatactatgtatgatgtgcagagcagacggcggattgcatgatattatctgcctataggctcgcagtgaaactaaatatgttgtgttatgctctgcggggcatttgaagtcgaaccggtttcatagcagttggtatctcattgtagcgttggttgattggtaaaaccgcaacccttctcttgctgcacatgtatgcagtgtgacaatcagatgtacggcatgttttagattgggataggcaatgtacatgctccatcctttttctattcctctgaattttctctgtactcaactggaaaaccgggatcggatggttatttactaatcacgaagctataactccgtacttatggatatatgtgcataggtattccggctttaagtattctatttactctttcaattaaaagacaccataaaagacatgaaattaaagcctctaatatagtatcaagactttgcagcattaccctctagccgtgagaaaatattgaaggtacatactgggaaggcgaccgagttaagggaaagtgcctctcaaattgatgataagatccaatattattatataaattattttactccatatcttacctgttattgctgatactttatatgcactagagacataattcaaggctatttgagcgtgtgtcgccgctggcatcgcaatattgatatacagttacattgttggtgcctgagatatagggctacaatgccactcctttacggccctgtgcaggtaacattcatggatgtctttgcaaaacaaaaacaccaaacgagaaaacacagattccgagtttcaccaagcaagaggattgaccgagctgacgttccagctctcggttccactcgcactaatggacgatgacgagagaaccgcggacttggcggtccacgaagtatctcctcgcacgcgatcaggcagcgtaagtagcggccacaaacgaagcctttcgggttccctcctctcgagactttccttccttcgcgtgaaccaggtagcacacacctccctggaacgacaccaccccggtatggatcacgatggcgacgaagagctccactccggtatgccgcagaccacaggcaagggaggaactaccagcagccgggcaatgtctgccgctctcgcacaacaccgaacgcgccgtcggcgtggttcactccgcaaaactgcattgctaggcaccaggctcgaatcgcgcgacaaaagagccaccgccaaagccgccgaagctctcgaagccctccgcgccgaacctagccgacttcctgccgccgatctacaagcggctatacaactaacagatcaaaccccctccgataatgggcctacgcgatactcaccgcgcgagagcggggccttcgacgatgaccgcgacgatacccaacaaccggcctggttcagcgcggcaaatacccagaaacccattcgaccctcaataagtcgccgacgccagggcctagcacagcaaaatctccaagaacaagcgaccgacgacgaggacctcatctccttccctcgcctgcactcaaatcccacagcggccgacacgggcaccagtcctaaaaccggctctgcaactggcttgcacatctccccgccatcctccaactcggcttctttttattcgctccaacctcagcccgaaccagcatacctgcccgtccaccgacacaagtcctcgcccctggtcacacatccggttgagatgaagagcagtcccgatgtggacgtggactactccgagaccgaatggtggggctggattatactggttgtgacgtggctagtctttgttgtgggcattgggagctgctttgaggtctggagctgggcttgggatgttggggagacaccctatgcgccgcccgagttggaggatgatccgactttgccgattgtcgggtattatcctgcacttatcattctcacggctgtcatgtcttgggtttgggttgttgtcgcatgggtgggtatgaagtacttcaagcatgctaatatatccggggaggatatttgattttcttctcttgttccagcgcataccatattataatacccttcttcttgtgagcgttaaatggcataaattccgtggggttttgtggttggctgacagtgttgacaacattcgatggtcaatacatatgggctgcgcaaatattgcagctatattgctgccactgcactatcagtttctggacatgagcgacaaagaggtataagcatcgctggaatttttcccagcaaataatcttgttgtcgtggcctcatatgtacggccatctagtctataaactatgtacatactgaggggcatgtataaatcacaaatttgcaacgtccaacttcctcaagcgcaacatactatcctgcaaagaagtcgctagcaacgtcccatcagggctccaaagatgactctcatgcgtccccctgttctccgtagcccgaggtgtccaaccctcctgcacaaaccacttcataggcaactcactcagaccgccaacaccgccatctccaacactctcccaatcaatcatccgcagagcctccccatgctgatgcacaataaccgtaagtgtaagactcgccatctcagtccagtgcttgatccccagcgcgcgcggaatcaaaagaagcgagtttttatcactggaatacatatgcgcacacgcatacaaattatcatattccccgttctcttctctctcgcggatctgcgccaaactcgcagcagggtcctcatccggtgatcctttgagccggtactgcgttagctggcgatatcggtcagggtgttgcttgacatcctcggtgcggttataatccttcatatcagtcttgcgcacgtctagaccgggaaactcgtgctcggagatgttcccctgttgcacggcatcgatccaccaatctgcgtccacgctgggactgggaggctggtcttctggtcgttttgccgagaggattgagtcgaagcgcgcttgtgctgatttcggctggtgctggaagagacgctgcttctcatcccgcttgaaggagcatatgcacgagaagcagattctgcctgcttgtctcgcgtcgacggctcgtgcgctgtacatgaatccatcgcggatatgtcgcactgtgtacacgtacggcgtgtcgagccgtcccgctaggatgaatgtacccgtcatatcctgccgatatgtcagtttgaggttctttgagggaaattcatgtataatatcttacgtgaatcactaaaccccgaccgacggtcttggacgctgcataggctgcttgggcgtagacatgtccgccgaacgagcgcgttccttgaccaggattgaaaggtattgccagcgagcgaaaccgctcaatcttctctggtccggtggagtcgggatacgagatcaaggcatcttcgagtcgctgcagcgacatcaactcggtgaaagaatgcggggaagtcagctcgccgtcattgtccggggccctgctttgtggagacatagcgcgaaagaggcgagaggcggtttgatttaggcccttttcttcccaaagagtacaagtagtgtgaagcagttgcttgtcgacaagggtgattgttctgcgggctgatggtacctgtccgatcaataacaacggcctctgagcggtcgtggtatatgaaagtaggattaaggatctgagccttatacagtattctgttctttaacggaaaacgggtaggattgtcttgtggggagtagaggtgaatagatttgataatggatgtatggtgattggtaccgagtacataccccggactaagagacgggaccggccggtgcctcggcttgtcagtttgactcacgaccctacaataactaaatagttcctccgtagttagtacaaaatagggtgaatgttctaagtgtaaatatttcgcataaagtaactcattttatggcttctgaatcgattatctatgtacatatagcatgcttagtccaaattcagcgttcacgactgatcgggtgaatacatttcggctggagcgctttgcttcaggtttacataaatcgaaccatggtggcgttcacagggtacggcatgtcgatctctatatatacgttgggttcctttgccatgctcgccgttgccatctttcatggagtcaagaatggagggaacaggaattgtatagtaacagccacaaaatagacttgtagatcaaactggtattttatacaatatgcgccgattttgctgataggttcgagtggcagttccctatgcccgtgccataataatacaaagaacaaaaaaaaagtgctggaaactaaatgacgctcccaaatctgatatcaataatcaaccaaactttcgtcgaaaagatcacgtcgattagatctgctcggtaatggtggaaacgttgttccactcgaccttgccctcgatatccttgatctcttcgagcttgtcgccgagtttgaccacggaaaagttgatcatacgcgggtcgaggccgagagtacggcggatagatgactgaacagagccggaagagtcgaagcgcatgatgaagtgatgaccttcagtgtatcgggcctgatgttttgtggtgaccttgggcagacggaaggcaccccagttggtgtagccgcgaacgacgccaccggagcggatgacttgggtaccggcattacgggcgattctgcagtaaaatcatctatattagtattcgacaggttcggatgatggagaccgcggcgatggtgttggttcaaacgtactctcgcacctcgttgaggctgcccgggcggacctgttagcagagcggttagcaaatccaaacatttctttgagtgtcaatatgacagtttcgatggaactaaagcatacaatggcaattagctcgtacaacatggcatcgagggttggcgcgaactagagacagaaatggagcaatgaccatttgaagccagcaaaatccgacgaggttagcgcgttgcttatcgtagtcttggcatttcgttatcggggaaatgccgtcaacgaaactccgccggagaagcgcatcaccttctttcccttttacttaaactctctcctcttctcatttcactttccacgcttctcattccttttccctatacctcaaaatgtcctctgtcgctcgcgcaatccgcccctttgcttcccgggtcatttcccagaagcctcttgcatccgcctgccaggtttcgcctgctttccgtttcccgcggggaactaggagcttctcccaaagccctctctgtgagtactatgaacacccaatgctgttaatgctgtctaggacgatgtaaaacatacttggaccggcattggagcatcaaaatttatcaaacatgctctatgatgttacattttactaacggcgcaccaattcgcaattatagcccaggtgaagaagtacacagagtcgcacgaatggattgagctggccgagggcggcaagactggttagtgaacaaccacctcgatcaattggtctcatacacctgccttccatccattgaaccggtgccaggtgtatatggcctccaatagtatacagaatatggagcagcgagctaactaacagactctctacagccaagatcggtatcaccgactacgccgcccactccttgggtgatgtcgtctatgtagagctccccgaggtcgacctcgagatcgttgccggcgagcccgtcggcgctgtcgagtccgtcaagtctgcctctgatgtcctctcccctgtttccggcaaggttatcaagggtaacagcgtcctcgaggataaggctaagaccatcaacgagagtcctgagggtgagggttggatcgctgagattgaagtcgctgatgctgctgagctcgatgcgttgctcgatgaggctgcctacaaagagactatcgatgcttaaatttgtggagtgattgatcttggttcgtaatttataaatgcctgtctggagctagatgtggtgaatttcttctttaactgatgttatgttgtcatgtatgaccaatggtgaccaatttccttcaacgagagcgtttagatcttgtcgatccgtttacggatcgacgaactattcaacaagatttctgtatacgtggacggatagttgttttatttccttgtagagaaaccatagtccatatatctaggtggatgtatatttagagctagatcacgcatgtcgcaatagtggaatgcaggtctgtgtacaggaagatgatatcatgtatgagaagcattacaacataagttatacaggaggtatggattcacgacagatcggacattggaggcgaagtctcatccagctttccagacaggcagtgtggaatatatgacgacaaggagtgaccatatatagccggcgactcaagatgcttgcggccccatcggtgacgctacttccacccgaagcagaaggcgcgggaaggacaggaacctcgatatcctgcatgcaaatagcacagtcgaatatggccttcttgcggtctttccgctgcttatcatcatccttcgaatcactgactagatctcgttcatcaccgcgcagggatgcaatcgacagaacgccaccaccggcttcgagatcctcgtccgctccggataaatcgcgcagcatgggatggtaatcgtatgcatgcggtgcccagccacgaggcacaaagaagcgtggcccgagaacgtcctggctgaccaggatccatgcttgaatccacacccatccagtcatgatgaatgcgcttgtatagtcggggcggataaacaacacgtttccccgtgccgtgaggaagtacaagaatgggaagagtcgcagaacactttggccggcaacaaagtcccaccgaagagccttgcggcaatttctcatcgcgttgcggtagacctgtggaacccagaaggagagatagactgctgccaagaagcgggtgtatattgagccgagacgtctcggcaggaggaaagcccagattgacaggatgagcatgccaaatagggtaagatagaaccgtgcgtacattgttcctacgtcgctgcggatttgccttggagttgggggagtggctcgggtggttggcggcggcgaatccatctcatcgtcgggggcatcttggtcgggtgacaagatgattggggtcgctcccgagtctcgtgcttccgaagcagtggcaggcaaaggcaaagttccagggcgagttgttggagttgatggattgggcggacgatcttgctctcttctttctggctcttgcactgcccatatttccatcatgaacttcattccaatataactcaccgacaggaacgccaaaaatgatgcagtaaccaaaactaggaaagatactgcggcatatagttccaaaacaatgaatgtcaaaacaaatgcatcgccgagcgccatcaatgcgatggtatagaagctgatccgactccgggtagaaggagtcgaagcctctttgatctgtcgaagaagcagggtgatctgtgcaacaaaaacaccagaaaccacaaaaatgagacgagatgcatatttactgtactcttcatgcttaggcccagtcacatataatgcatcagaaggaggaaactcaggggttcctttcgtttgaagtatgtacccgcagtctggggagaagacaacagcagacatgaccataagaggaggatctgggattggcgctcccataggatatctgagctcttgctccatacgctccaataacaatcggtcagcaacggcatcttcgagcatgactggatgctgctgcaagtagatgatatgttcacatttaggcgcagggaactccatctgctctgttcctgtcagagaggaccaggggaacagtgttgggggtcgattttgcttctccgagatggtgtccgacagtgacttgagaagaagctcgtgtgacaattcgtaagtgtcagaagatagcatgaaatgcggcaacgagaagatgccgccaaatttctcactggaagtagtcaaaacgatacttccggtgtctgggaagtgtacacctaacaacgagatgtaccaggtacttccccagaagtcctcgctctcgaccgtcaaactggctcgcatctctctcaaaagtccatcgcccatctgaagttcttcaccacctccctcttcaagatcaaagtaaaaggtgccgctattgccagtgatattatgactgaattcatgagtaaagtattcgtgttcttcagcgatggctgtcgtgttcagaggttcacggcgatgaacaccttcagttcgccgaacccagtccccccgcagcttcccggttgagttgcgatatatcggaagcagaagcttggtcaagttcaaagtaggcgagacaatggggtcttctagaccgtccggggattctagcccggcatttgagaccgctgattgtaactggtggcgagccaggcctttgacctgcggaaaaaggtcccaagcatagctgtcattccctcttgaacccgaaaaaggaagccatcgattggcgggcggatcgaagtcgccatattttgatccattcaataaccgaaggacctgtcgctcatggtcaagctcacgttgccgtgcccgatcttcatcgatcaatggcggtcgagactgggaactgaagagaaggtagaacaccagcacgaagaagaaaaaggagccgcggttatccatctatgccacgcagtctcggcatcggactcttttctcaaagacagacaataagcatcgcgataaagagaaaccaaaaaaatgcgagaaggaggcggggagctcggctaagttacagagggaacaaacagaaaagaactaatgaatgacgaacgcagtataagaaggtgtctacggagcggagttgatgatgtactcgaccccggggagcctgcccgccgggcacccactccttgctgactcatgacgcctcaggcatgatggatggatcgatatcaaccctggaaacgttctacttcgggatttataccccgtaaaattaaaatagagatgaacaaattgtttcttatctgaccattcttagccagaatttagaacagaccaaaaagataaaaaatgccaatgcattttatggcaagaattgtccactaaatgcgaagacccgaatgcttgatatcaaaccggttgaattttggtacaaatagaaaaacgcatacacacaacgaccatctcaatcataatagctctgctttatgatgcagcagccaggacaccaccctcgggcttcgcatcccgccgccgacgcttctcgagaatggcctcacggcgctgtgcaagcatcttcaattgtctgctctcaacaccctgaagccagtaaccaaagcttccaccaacaccggcgaagagaggatagacccagagggattccttggcaaggatcggacgcatctcgataccgagttgccaaaggcggacggcaatgcctgtcggatcaacacggttagttccaatggcatataaataacttgaacaatcgtgctaccaagcagcgtgctcttgtgatagattgaaagctggggaaggagatgtgacgtaccgaagccgccccagaagagtactttgtgaaccatgatcgcggtcgagcgcggggttgtggttgtaattcgggtgctgatggagatccgagaaagattttgggaaggcggatgggttggctggttgattcaacaccacagcagccgggataattgggggcggagatagatgttgccgtcgcaatagtccaggagagacgaggttgaagcaaatcaacgggccgcagttcccaagcacggaacaaccattcttccggtcacacttgttatcgcttatcgctcgcgcgacttcgacttccccaggccaactatggcttctgatgaggcaatggatgattctacagctaaacggcctattgatattgagagcgtgaagcgcaagaagttcaagaccgacgaccttcccttgtctgcggcgcaacatgcagtcattgacaaactcttacattcattcaagaagaagggtggctttgatagtgtccgaaaacaaatatgggctgaattcaatgacggagtatgatatattatccacatgttttttcgcaccatgctaatcctatgcgaacaggaacttcgaaccgagtttaccaacaagttagtcgcacttgcagagtcagcgatcgatcgcgagccggcactgctgtcccgcgaaagaggaaaggcagcgacactcattgagggcgcggtggaccgcggtgatgtctacaagagcgtggaggactccatcgaccaattagcatccaaacacctggatttcatcctggaatctgttcgtgagatccgatgtcaggacgttggagaggaagtggctgcccgtgaactcgagctagggaacaaaaccgatgcagattatgaagcctacgtcagcgcccagcgggaggagcgggaaaaagtgtggcgcgaagaggagcgcaaacagagagagattgaggaagaggaaaaacgcgtcagggatgaagaacgcaaaaagaagcgtgaacttgaacgacagaaagacgaagaagaccgggcccgaagaaaggaaattgatgaacagaggcgagctgatcgggaacgccaacgcgaagagcaacgaattctcgacgagcagcgagagcgagagcgagaggaaagatacgagcgacgaaggcgtgaagatagggagcgatatcgaggctgggaccgtgaccgcagtcgaactcgagatagagaccgtttccgtgatcgctctgaccgtgggttatcacctaggccccgggattcaaaacacgacaagtcatctacatcgaatgttcccactcctgtgctaccgcctcttgtggatgagaagtcactcgaggaggctgctttgcaaatgctattgaaagaaggcgaagaacttgcagccaaggctcgacagaagcccgagtttgactttgaagaggccgaggctattgagaatggactgaaaccgccagtatcagcgttagggccggccaagactgccaatgattcaaggttttctaatacatctacgagagcggccagcatatcccgagatgctaacacgaggcgtggttctcttgcagaccggggtgatcggtcccgacatttgactcgggatcgaagccgtagtcgctcgcgtcgacgacgcacctcacgttatgacacagatcgccgacgtgaacggtctcgggatacttctgtgaggtctcgagatcgtgatatggatgcgcgccgtggctaccgcgacttccgggatgatcgaggtggtggaagctacagaccaagccgtcgcagccgcagtcgatctgccggccgggaccgcagtgttggccgcgaccgagaccgcaaccgagaccgagatcatgacaattatcgtcctcggcgcagtcggccctctcgctcacctgtacgccgacgttctcgcagccgctcgcgctcgcacccccctcgtgctcgtgaccgtcctcggtcacgttctcgatctactcgacggcgatctcggtctcggcgtcgctcgccttctcctactctagatattgaccgctacgtgccctccaccagcaaccggagcaagtcaccccgccgccgggtccgatctccggagcgagagcgagaacagcgaccccgtttagccgatattgaccgttacaaaccggtatctgaacgagataagggttcgactcaagcaaaagagggagatcctgaggttgacatagaaaaagaaaaggagaaggagaaagaagaagagaaagagaaagagaaagagaaagatacagatgatcgccgacctcttcgacgaacccctagtcgccgaaggagtcctagccgacgaagaagcccaagtcgacgacgaagtcgcagccgcagaaggaaccggagccgatgatttttatgcaactttgccatgtatgaaaagaccagggagacttctgcttacaattagaaaaagattttcgggattgacgccgaaaatgaccgcttttgaggccagaaacggctgcctttacacccgtaactttggaccactacaacattctacacccgcccagcactgttagtcatcctctagccctgatgttgacgctcgacttgtacagttagttgttccccgtatttccaacaacatggagccttcttccatacgtagccttatcatctttcaaaagaagggtggtaaatggttaaactgcttcgacccggacggttattgaagtgagtgcgtctaaacgggcgaggaaagaagaggaaaaaaaaaatagagcaagctcaaatgtgcgatttgactagatgctcaccacgaagcacccgttcttattaagaccaatgctagtgaaaatgaatttatcgcattctattgcggtcttatgcgatctctcctctgtgcccaagactgttgtgatagttttcccattcaatactcaagtctttccttttccatccttcgctcccaaacgccaagcagcaccgaaaagctagcaatagttctaggtctggggcttcagctgttctttcaatgtccatttgtcacatctgtggcccggctggccttcccgctcatcctgtatatcctcgcagcgcctgaccagcagttcaaacagacgttatatttcatccaactgttttgcttcccgcgccctcccctcagttgactctaaatgactcgggtcaggacaaaagtcggcatccatccaaccacctagatacagcacccagcggcctgacattgtccgcgcgggaaacacgaagtcatgtttgacacattatgccacgccatggctgtataataagagacagaccgtgtgaatcagcagatgctcaggacttccctttctagctcgtactgctgtttggccgaccttagactcatgggtaggggcctttacgacggctcccgttaatacagcacgatgccctatagttgatttgtggcgatggcgatccggcttctgtcgctgtgataggtctttcttggagaagacttactatgtagtaaacttagggggtaatacttcaactatgtattcccaagatcacatgcatcgatatcagataagcttatccgttatcagttctccacccaaaaaaagttgaaaatgcccagactcgccaacttccactctttcaagacaaccgaagacactgagatcatttagccatataaaaaatttgtatattggcacgcatccaagttgctaaaccccacatcagcgcatcacaatctctgaaaatctctgctacccccagcgaaccacatacctccaacatcgaaaccatgtcaaacgcaacgataagatctgaggctgctgcaagcaatccctctccacaatctttaaacctagcagaccgcactgcgccccgtcgacagcgcgccagctctattcaatcatctgactccgacccaacctcctcctcgggctcatcttcagaggatgacaacgagagcgaaagagaagacaaacaacactccgaccaagaaatgaatggcaccgaggagtcgaccacccatgcaaatgcctctgatccatcctcaataccccacatcgccggccgcccgaaaccgcgcatacatcgtattagaggcgactcgggacttttgtcgcggctcaacgctttcttgccgaagatgaaagatgcaaatgagaatttgcaaaagcagattgaggctggggaggctggagatctggttctcgataatgcggacgaaaatgcagagcaatatattgagatggtaaggcttattgattgtgcttattgattgtgatggggtttgctaatggatttaggatcttggtcttggggttttggaagagaaacgcgatggtgattcttcgagtgatgaggagagtgatgacgaagggtctaatggtgtcactggcactggggagacccctcaagagatgaatgactcggatatcattgggaagcttatgggaggtaagagtaaaaagttgaatacggacaagccgtctatcgaggagatggcttaataggcatttgttcgtttgatttagtggtgggttgcattatttataacatttttggtggagatgcgcggtcttgattcaatcacgattgacattcatttgcattatcttgggctttgtgttatcatttagcgtctaatgcttttctttttccctctacagaagtggcccagaccaatcgcgtgcacaaagacacatacattcattccctttgtatgcaactcatcaggaatcaagtctagataaacagatatggaagaggaaaataaaactgtaaaacaaaacatgagcatatcgcggatccctatatatgcatgaacccatcatacactatgaccgaatgacattattaaaaagtgatatattttgcgtttcaccatctcgtttcttaggccacttccttgatgcggcaagtccagccggattcctggctcagaagaggcaagctgcagcaggtcagtatactgattagaaagggacggcaaggagtgaactaacctcgcaccaagacaccaacccagctcgttgtttttgatcttcttggctatcttgacctcgcgggacaagggaatttcgtaaccggtgtgcagcagaaccgtcatgaagctaaggtccatacaccattccggacgatcccgaagctgtgcaagcgcattatcctcaccctcgaacttaacactttcgaacgccttccattcactctcaccagcacaaacggtggaggtcagctggttaagctcattcagagtgaaagattccggcatgccaagtggagccgtgcggtcgaagaaataagagaagatgtacaagtcctctcgagcgaaagtctttgcgagagatggctggtgcacaccgttgaaagaacagggtgcaagcttacactcgccgctcttcttcaggatcttctcggcgatagcacggcactggggggtcatagacttgtccttcgggccaaccatgctcacttcgacttcaggccccagcggatgatcagcggggaacttcagctttactgtcttggtcattcctgtgccaatgcaggggttggagataggctgcttaacccaggaaaggtccttggggctctgagctagcatcgcctccacgaccacggtgtttatggccgtgcgagcagacatgagaccgtatcctagatgagagtgttggtacagctcgaaatggcggccaccaaagttgaggtcatacttgtggtcaccgggagcaagacgctccggcataccaccagccttgctctgctcgaatgtgggttcgaagacaatctgagtggaaccgccacccagatcaaagacagcggccgtaggagtctcatccgggccaccaatcttgcccagcaggtagttggttgtaatccaagcgtagacaccttcctttgaaccatccatgatctcgacaccacctctctccttggagacaacggggaaggggtaaacagtctctagacggtgtctaacggcttccaagatcttgtcgctctcttcaggacctagaagacgaagtccggccgtggccttgacggcaaccggagagcacgacctgtactcctcggggaccgacttcacagcgacctccataagagggtccagactcagagctgcaccctcggcatcctctccaaaagagctgagaccggaggagcctccctccttctttttcgtttgttcgaacacttcattctcaagttctggggtagggccgcagttgttgaatcggtatacatgaattcgggacccagtgctgccggcgtcaatcatgagagcgtactgaataagaggcttggatgaatcaaacggcttggtgcatactctcgaagtggacgcgtcactgcttgaaggtggttgctctgccaaataatcagtcctgcgaacggcagcgcgagcaaggggaacaccaaccgttggtaagatttgaagtgctcggctgtgaaggggagagccacactaagaccataaagatgaacgcaataattgcccccgtcttcaagtaacgcgatctctgggtctgtgccatgttgacgggttgtttgtcggagaattgactggacttaatagactgcgatatagcaggtccgtcgctgttggagatggagcggtggcgggtggccgaatctatgtagtcggatttgctgttagggatttgattgtcgactccagtcgacattcgagcagttgtcaaattatgagggtgcagtgacaggtggcgtttgttgctggcgcaagaatggtgaaacgattgtatggggttaagaggaataatgaaacaagtaagtaaccattgatcccgatgtcctccaaaaacaccaagccagcctaagaaaaaaagtggatggatgtaaagagggaaagtctcaggagagaaaggagattcagggtttcatggttgtggcgcagatgtggcgttaaatgcatgcatggatgtacatacaacatagtactccgtacataccacggggaacttccagtatttacgcacaataggaatgctaatatacaatcatagcatctttctcttctactaagtccaaagtaattttccttctaaaatcaaagagaagaaaggataagcaagtaacgtaatgattgtacaattcaatcaagttggcggtgcaagctacatagagtgctatatacacgaaagataaaagaacaaagttgaagtatactcagcttcctagagtgtactccgttgggagagtactccgtacagctcgtattgttagcgcgtatagggattatttattgccagtgcgccccgactcttgaattgagggagcaactcacattttccatgtgtgtattaaggcagctagctgttttagactacacgcgggatgccggatatgcttgttaatgtaatgagccatcataacttggccggaagcatctaacctttcaaggttggtatgtaggtagatacctagtccgggggcagtggtttactaatgtttgttgtgtttgcatcctggatagccatactgttcaacttactccctatgtgttgcaaaaacactacatctctcctcacaggcgagcttgccaaccttctacaactcctgctacattttccgctaccagccgacaatatgaatcacacacgcagtttcatatcatccgcccaggccctacgccagatcttcatcgcacccgttcgcacctccagagttggcattcttgcgttcagtcctcttcagaatgcaccccagactcggttttttcaacaatcccattgcctagagcttcgatcataccggccacccgttgaaaagcccccgataaacgaagctatccgtgcgtcgtttgtccaagttgtgaacgacgaaggtgacctcgaccctcccaccagactagaggatgtccttgaaagctttgaccacaccgagttctttcttctccaggtgcaagaaggagacaatgacaacccaccagtttgtaaggtctacaataagaaagaagtgcgagcacacgaaaaggccaaatcaaagtcagctcgcgaatccaaggttatattcaaacaaattgaactgaactgggcaatcgatgcccatgacctgtcgcaccgcctgaaacaactctccacctttttggagaaaggccgcagggtggaaatcctattgaccaccaagaagcgcaagcgcaatcccacagtggatgagatcaaacaggtcatgcagagtgttttggacacaatcagagaggccggtggaactcagaccaaggcaatggaaggtgaaccggggaagcaacttaggattaccgcacagaagaatatctagcggagaggactgcttccatgtatactatatggcattgaactgtacgacaacgtgacatcgctgtttctcatcactgttatactattctttgggtccactcgcacataccttggaagtagcccggagagctaaggccgttggaactctccgtattgagacacatctattcataaaattgatgtttcattatctccatttccaggctaggtattctgcccgcaattcgaggcctatgattggctgatgactaagctgtcctgagatgggtccattcatcccggaacccatcttactagaaaatttggtgttgacctgggcttcttctttcccatccttactccatctcttttaatctttcctttttgttcttgttccatcgttttatttattgaaccaagatgtcgagcatctctcgttcattgaacctcctggcgcgcactagccggtcctccctgctgcgtccgactaccgtcaaccccgtccaccatgtcttcagcaacaaggtgaccggccgtgggttggccactgctttcgagcgtaacaagccccacgttaacattggtatgatcctgtcgttggcgcataatccatctccacgctaaaaggttgttgcttaggtactattggccacgtcgatcacggcaaggtaagctattcgcaacttgttccgacatttccgccatcttcgaacatgagatttaacccgtccgcccatagaccaccctgactgccgctatcaccaagcaccaggcctctaagggtcttgccaacttcctcgactatgcctccattgacaaggcccctgaggagcgcaagcgtggtattaccatctcgactgcccacattgaatttgcgactgaggaccgtcactacgcccatgtcgactgccccggtcacgccgattatattaagaacatgattaccggtgctgccaacatggatggtgccattgtcgtcgttgctgcgtccgatggtcagatgtacgtcccccggtctaaaaacctagtttgatgagtgtgctgacgcaaatcacgcattaggccccagacccgtgagcacttgctgcttgcccgccaggttggtgttcagaagattgttgtgttcgttaacaaggtcgacgctgtcgaggaccctgagatgcttgagctcgtcgagctcgagatgcgtgagctcctctcctcttacggattcgagggtgaggagactcctatcgtcttcggctctgccctctgcgctctggagaatcgccgccccgaaattggtactgagcagattgagaagctcatgcatgccgtcgacacctggatccctacccccgagcgtgatatggataagcctttccttatgtccgttgaggaagtcttctctattcctggccgtggtactgttgtctctggccgtgtcgaacgtggtctcctgaagaaggatactgaggttgaaatcgtcggtgcaaccgactccggcaaccccatcaagaccaaggttacggatattgagaccttcaaaaagtcctgtgacgagtcccgtgctggtgacaactccggtctcctgctccgtggtgtccgtcgtgaggacatccgccgcggcatggtcgttgctgcccctaacagcaccaaggctaacaacaagttcctcgtgtccatgtacgttctgaccgaggccgagggtggtcgccgtactggtttcggtgccaactaccggccccaggtctacatccgtactgctggtaagttcaatttccactgatatgatatcaaatcgataagggatgctaactatgctctagatgaggctggtgatctcagcttccctgatggcgacatggccagacgtgtccaacccggtgacaacgtcgagatgatcctcaagacccaccaccctgttgctgcggagcccggtcagcgtttcaacatccgcgagggaggccgcaccgttgccactggtctgatcacccgtgtcgtcgagtaaatggtccagtaaatgatccgctcacgcccttggtcaggcaggcgaactgtctgacccttgtattatgaaccctttttctttaacatgttgtttgttttggcacctttcattccacagcgcgggaatcatcgatcagcacgagggatccggggtaaaccggagttttcgcttgaatcttgttactgtcttggagacaaatgtagtcggattttctttcatttctccactcccgtgaaaatgtattcagacaaaattcttcctaaactcatatataatttcagtccaagtcttaagtcaatgtgtacaagatatctcgctgcttcacctcttatttctttatataccatgagaggaacaaacttgaaagctagatacatacttgtagacttaatcgaaatactccttacatcaacgccaaatcgcagtcccgtcgataccggttccaattgatgtttcgcccagcgcctgattgcggtatcgtttaagaataatacaaacgttgcgcattttcaaatacgccgtgcgaaatcagacactacaatcgacactatatagagctgagcaggatttggtgctgatatatggtgctgcggaccttcgcagtacttattaatatgtgatgctacgctagttagttagcatacgattcgcccaggtggtacgctatcataatagaaatccatatacggaggatagtatcactgaattctctcctccgataccggtgcgcgggttatagaatacaatagtatatatcgtgctccgcgcatcaagcatttcatatctttatgttgtatgttgtacctacatatgctgtacgtacctggaagaattttagggcgcattacagtgcgtacggagtggagtagggatgttgacacctctaattggaccatctaattccacatagctatattttcctatcattgggccttctatcaacccacagatacgttatcagacagcgttcgcttacgcagttcactttcattggcgctccagggctgtcattgctacctacagtagaagtatgtaacctcacaacccgcaaaaccaatcgggagaaacggagaaccgcatcaaaaggattaatatattgggaagaactccacaaacaataccggagaaacggaaacaaggccaaaacactatatttaaggggaaagccatgggcacatatgtagagggcttttctggaatttttggtattttcttagaagatcgcggaagtgtttcgcattctttaccaccatgaagaatcgagacgatattggtcctatagccagtggtgggacagttgctgtgacgcccttgcaagctcaagatgcaccgacttatctttttacgttgtatgattttatttttacatcaattgaaaggagagaagcctaatgacctacctagcggagattcttacacccagaccgatttcactgtcgatggcacacagccatctatctcaaacccgatggggaacccgatactaggtgagtgctattcacctgaacaagtaggattgaaataatcttagtgccaaatagggactggcacaacgagcggtggtatcaattgggtcggatacttgaccactctatacaatgtctcgccggtactcagctacaacttcgccgtcataggagcgacaatcgacaactctattgtcgatagcaaggttaaggatgtgacatcacaggtccgggacttcgagttagcatatagcaagaagcctacatctgcaccatggtcttcagataatgcggtgtttgggttttggattgggatcaatgagtatcgcgccttaataccccgttgtcagttatgttctaatgcttccaatttgtagcatcggccgcggtcatcaaaacacccaacctaatgtacttgtgccgacattaatggcccagtacaaatgtcttattgaaaaaatatatgcatcgggcggacggaggtttcttttcctcaatgtcccgccgacagatcggagtcctatgatcaccaaacagggaccggaagccgtcaaaacacacgctacgtgggtgagggcttacaatagcggccttcaatcaatgatcagtgactttaagtccaatcataccgatgtacgttttgatctcttgcagtatgttcatataattaacctgatcgtagactactatcgttctttacgatacctggtcctttatgccgaagattctggacgatcctcagacatatggatttccgaatgccacttgtttcaataaggatggcacatcctgcatttggtgggatcattatcacccggggcagaactaccataaactgcaggcagcagatatggttcagtacttgcagcctctcggtgcttggtagactggcagaggcggagcgagatagatagacgtgaatcacaagaggggatcaaaaagcagaccatagaatagttagcagtatggaaaatcccaaacacaagtcgtatagaggttagatatatatgtggtagacggacttaagcggaagaagcgtgtaagtgatgcagctgattggcccgggcaaaaatatcccaccacttcggccgaacttgacggacgaatatctatgagagctaactactcaacgagtgtggacttcttttttgttcttttgtttaagattacgtaggcctggcttgacctcgagtgctgccttgactcttcagggctgttgcgcccctttctcggccgttttgtctctactcccgagattattcctcgcccaaaggatgatgctgtacaacctccaacggtcattaatctgatcaacctctttagcaatatatcgtcggttgacagatgatcttatccttgccttttcactgtatggggtaagatgaaatcctgcacagaccaagaaccgcgaaagcggatgagaaaggggaccagaagttgcacagagtgtatgtgtcaaatgattgataattgatatctcggcgctaatagcgttcaattataggtcgtcgacgcaagatccgatgcacattccaccccaaccgcccagaaatctgtaatgagtgtcggtccagaggcatgaaatgtgttgatcaagaacatgcggttatcacccctccattatccggctaccagcggaactcccaacttggcgaacagccatacagcctacgcgagcgagtcgcgcacctagagaacctcgtggagcggttgaccgaccgacttgaccaacgggactctgacactccgtcttgtgagcaccatgggataaatcaatgttggtatctcctggatacgtgtgtattgatatcgcgtgattgacattaactagcggacggcataaatcacccaaggccactggctgccgagccagacgaactaggcccatccagtgaccagatttgcaatgcaccaatactacaactgttcgacaactatatcgtgagccgccaagaggactcgtcgaataatgataaattcaccggtgttcatgatatgtcgccaaaggccgaagcggtgcgtgccgaactcatgtctctccttcctcccgcagaagatgtgaataagataatcaacgcgtcgttccactggtacgtgtggcaagatcatctcccagagctgttcgatcgacatgtcggcagactcgcttttaatgaaaattgtcgcgataatctagtggctcccgccgaagtcgccaaggcactcatgtgcctgtgtatcagtgcgagtcatgctccgtctgaattcgacttcggtactttaaccgtgccttttgagcctcaaaaattctctgatcgatgcattgagatggtggaccgtttaatcgtccgtgatgacaacttcgcggctaccctgcccggtatagaatgtcagatgttgctccacagagttcatttgactgatggccggctccggaaagcttggctagtgattcgtcgggcaatcgagtttgcccatttagctggaatgcatctgtccaccaagattccaaggccaggcgactccttttatgaacggcgcttgaaaatctggtgttccctggcaacatcggatcgatttctgagtttaattcttggcctgccttatggcatcagcgatcaattctttttaccacagatggaacaacgcctcaattcaaacttatcagctcccgaggaatacgtgttgcgcattggcattattgcgggacatatggttgaccgaaaccaagacccttccaagatgactatcgcagcaacattacgactggatcaagagctgcaggattcttgggaatctatgccaagtcactttcaagtcgcagagccttgtgaggatgagaatcgggaacactacattgagagggtcccgttgcaattcatgctcaagctactgcgtgcttttctccatctacccctgatgctgcaatctccccatgagcctcaattccgtccttgccacacgatcgcgattcaatccgcaagagaaggcctcgttttatacaaggtccttcgatctaccaccaagccctatttgtgcaaaatgatcgactttatggctttcacgctatgtcttcttttgataatccacctgcaaggctattccgatgagaatccatatcaaagtaaagagcaagatgaagaagactggggtatggtaaagaaggtgattgagatacttcgtcaggcggcaacagagctaggaggctcagttgctgctgagtctgcgaacatcctcggcgctatccacgacaccaaagatttcaagcacgattggagctgtctctcgagctgcaaaattacagtgccctattttggtactattactgtcggtgcaggaaccaagttttccaagggtcgcccccaaagcaaggagcagacatcagtaggatcaggcacaatagggacggaggcttcttgctcggaacaatgtcccactcagctctatacgccgccgatgtctgaccctgaaggtgcgctatgtaccaacaatgatgccttgaacggtgcttccctcacacccacgatggcgtctggatatccagacgaatcatggcagtcgagaagtgaagtagtggcaaacccatatgtcggcctggaactcaatgcgtttaatggactgttcgacgattttgggcagtacatgtggccaaaccgtaatattgacctcggacttgatcagggctggaatctgaactggtcagatggcgagccaccaccatgaatttagacacccttgtggctttacttaaatgtctgaaatatttatatgctgtaaattagaacatttgacaatatatgtattccgtcgaaagaaatgcgatttctatcatctgattgcatgaccgggaactggatctgttgccagaccctggtcatgtccaaattggccaagtagcattgattccctgcagtgtcaataccattaagattagatctcaatatcctgttaataaaatgtaatagaagagatcagaacaagaaatcgagcctagagaggtctagaaatgacgttgcccgggggttaaagggggttatgtaagattgttttccccagcatcgacctcgggctgattatctcaatgaacccgtgaaaggaccgtgtgatccctaaattattcccatttgcccgtttgattagtctgttgatgtttcccagttgcatggtcctctagatcctagtatatccttgttatttcaacttgctcttgccacaacacctcctccttgcctaacatacacagagcagaagataaacatggccgaacaacgcccctcggggttggaaaggagtccaactgcgccgccggttctctcaaacggccactttgcttcgatcggcgccgaaggtgatacggcctcctatgagcatggcgtgcaggtgattgatgggaataaggagttcaagtacgaccacctacatctatggtttaactaatcatgagccctgaatgctgatcgcatcactatagtcccaacctgtccaaatatttggcccttgagaaggtcacgccagctggtttcaactaccatctcatctccgtgttcggttcgcaatccaccggaaagtccacactgctcaatcaactgttcggtaccgagttctccgtgatgtccgagctggaaagaaggcaaacgaccaagggtatctggctttcgaataacaagaaccagggcgaagctggcgcgacggagcgaatggctgataacatcttggtcatggacgtggaaggaactgacggtcgcgagagaggcgaggatcaggactttgagcgcaagagtgcgctcttcgcgcttgcgacgagtgaggtccttattgtcaacatctgggaacaccaggtggggttgtatcagggagccaacatggggttgttgaagaccgtgtttgaagtcaacctgcaactgttcctaaaggacagacagtatgtatacttctgatggtccctttctctatcgctttaggtgctaacctctctccagcaccacccaccggtccctcctatttttcgtcattcgtgatttcatcggtaccacaccactcaagaacttgcagaagacattattggaagacctctcccgcctctgggacactatatcgaaacctgcgggtttggagaagtcgacaattcacgactactttgatttccaattctatggactgccgcacaagggttatcagcctgaccagtttgtggcggaggcaaaaaagcttggcctgcgtttccgggaaggtcaccgagacccaacgagggatgctcttaagggcgagttctccgaaggaggagtcttcctcccagagtatcatcgccgcatcccggcagacggattcgcacactacgcggaaggaatctgggatcaaatcgtcaacaataaggacttggatttacccacacagcaggagttgcttgcgcaattccgttgtgacgaaattctgcgcgaggtaatgatcggcttcgatgaggcgatcgtcgcatttgaggataagcaggccgagtccgtccgtgctggtgcgccagaggttctgggaggacttggcgttgccatgcgtgctgcgcgtgtcaagacgctaaagagctttgagacggaagccagccgataccacaagggtgtttaccaacggaaaagcgctgagcttcagggcaaggtcgatacccgcctcaaggcacttttccacggccagctgtcggcagctcacaagtctggaatccgtgacttcagtgattctgtcagtgctactgtgaaggatggccaaaagaagggcggcagttacgacttcgcggaaatcgtcaccaaagaggcccagtcttcgttggagaagttcgaggaggttgccaattccacgttggtggatggagcctcttggagcaactacgagcaagagctatctttgtataagaaagaactggctgaggtcagtgccggactgcgccgcgatgaaatgagacgtttggccacccgtgtcgagcgatgggttcaatcccgcctgggtgaatctgtgggccttgagttcaatgccctcgggtctggaagagctggcagtggtgcccccgagaacggggagaagcctgccgagaaggacttttgggatcggatctggaacttgttcgaagagactgttcttgacgctgagcggagattcacggaccgtgcgagcagcttcgatgctagcattgatgaggtcgatgttggtctttggcgactgcgccgtaagtcttggggtgttctccgcgccaagatcgaagaggagatgattgagggcaacttgctcctcaagcttcgggagaacttcgaggacaagttccgctacgacgaagccggagtgccacggatctggcgcccaacagatgacatcgagggcatttacacccgtgctcgcgagtctaccttgacagtgattcctcttctgtctcgtttccggctggaaagaactactgccccacccccgcttgaccgatggattgggcacactccaagcaccgtgacatctgcggatgaggaggatcttgcccccatcgggggggtagatgaacatgagggcaagagtttggaagaagagatgacaatccttagcgatacgaaacgccaagagctcactgtacgattcaagaaggccgcggacggtgtctatgtcgaagccaagcggagtgccattggcggtatgacacaggtccccttgtatttctacggtttgttgctggctctaggctggaacgaaatctgggctggtaagttttcattgatgaatccttcattttcgcagtctgtatactgacgttggtcttcagtcctgcgcaacccggtttattttattctgctatttgcgtgtgctatttgcgtatacatcacctatcagctcaacctgtggggtcccatgctgaagatgaccgaagccgcctcccagcaagctctggaagaaggcaagcgccgcctgcgcgagttcctcgagtcctctgacgctggccgccaggctattgctatgtcggctggggagcgtgctgcgtcttcaggccgcaaggaagagtatgaaatgtcggatatgcaaaagagtggctcgaaggctagtgatgacctggatggcatgtaactaccttgctcttctggcgatcacactgtactttactttctgtagcttctataagcatacaatgtggactttttgactacaatctctttgcacagaacagaagattcgacttttacgactttgactcgattgaacaacttactacatatttcttgcatcgtcgttgtgaatgcatccacgcattacaggggatggtgggggacagaagaagagaagggggggtttatactcgcaggtcaggtgaggacgttgcaccttccagaaggatatcgattacgttattaggcaggtgtacacaggttcagaaggaacgacaagggttctgcattccattgggatacagaagggtgcggcagcgcgtgaaggcatattctgggccttcttgatttgcttctatttcatcggaactcaacttctacatcagctcttcggtgatatcatatcctgctatgttagtagcatctcaatggcgaccttgatataccaaattcaactactgcgggggtcatacccacgtcaagggtccggacttcctccgaggtggggtaggtatatattcacccaacccagcgactaccaaacttagcttgtgcaatgtgaagctttgaagttatttggctaatctccttcgccaattccctttatcctgaaccatgtccggtattcctaatctccctgagacattcgatgatctccccgacaagcgtcggttctggcctgggaccgcagggtcagaagaagaagggctgggaatgctccgccttctgacgcccgagttagtcgctcgcgccgcacaaacacaaatccaaacaggcgagcgggtatgcttaaactggaacatggagaatttgaacccaccaggtagaacaagggcacctaaccgttgaataaaatgagaacctgtaaaactcacaactcgagaaaccaggattcggtcgcaaaccattcgagcaccgtgtcaaatgggtcgctgagggtgtcgctttcgatgacgagtaccacttcaacccacagcagtcctcccagtgggacggcctccggcaccacaatgcgccggccccaacaccagaagacgaagaccgacgccttttctacggcggtacgacggccgaggaaattctaaacgagaactcgtcgcggattggcattgggttttgggcgaagaagggtattgccgggcgcggcgtgctgatcgattacgtctcctacgcggagaggaatggcctcagcgtaaacgcgctgagtcggcaagtaatttcattggacgaggtgcagaagatcgcgcgcgaatgcaacatcatattccaaaagggcgatatctttttcttgcgggtcggcttgcccgggacgtgggagcggatgtcggccgaagagcgggtaacatatagtcagcagggcatgccgcagcatgccggaatcgaacagagtgagcgagtgctgcgctttatatgggataatcattttgcggctgttgcatccgatgctgttagctttgaggttttcccgcctctgaacccggagttcgatttgcatcatcatcttctggctgggtggggtgtgcctattggggagatgtttgatttggatgaattggctgcgacatgcaagcgtttgaagcgttggagtttctttatttcgagtagtccgttgaactgctcccggggagtgtctagtccccctaactgcatggctattttctaggttcttttaagaagctttaatccaaggcaatttgtagattcataacccgatttatcatttggggagtacggagtatcttaatgtcatatccattaccgccacgtgacccagccaacagacacctaatatataaggccaacatttttatatgacccacttttcccttttccccctttgcctcggaagcacacggcttcattccaatattgtttattgtacagatgaatcctcgactcgaattgagggtaatattgaaggtcgaaatcatgtcttgaacatgcaaatcttagcatgtaggcctttttgaaatatgactgatctcgacgctcagccacatcctagaacaggctaacgctaaggtctaaacatcgctagatttatcctcatgattttttttttcctttataggcgaggcatgctgccgccatgtgaaaatttattttcctctctgaagatatgccgcccaccatcaaacgggtggcggctcttctgtcctgcatcctcctagttctagggctctatatttactatcaacctgaaccatcacgaccactcacccacaatggagtacttgacaaatttcctgccaaaaagccaaatcgacagcaattgtttgatggctcttgggattatcagcgcgatagagataatctgatgctcacacaagaccaatgtgaccaggcatttcccgatctatacactgaacttgatcgcgccagggacgatcgcaaatctcgtccgatatccctcaaggaactggatgcaatcccagcccgaaatggatatattcgagctatgatatatgatcagcaggtaaacaacatcatttcgtgggtcatctacttagtgctaagcgtggtctagttgtatgtgatcgacaaggaaggctccatttggtcccgagaaaaagctacactgtctgcgataaatcgagcgatcatttcatcgccagagccgctccccaatattgaattcgctttcaatacagatgactcggtcgatgaattgcccctctggggatacgctcgtcgcgcaaaggacaagtctatatggctgatcccggatttcggatactggtcctggccagagaccaaagctgggtctacacgcgaagtacaagccaaagccgaatgggcggaagaagaagggttgacctggagtaataaaaccgccaagctgctctggcgtggagtgccgatcatgggcccgacaattcgggataagcttcttcaagtgacgaaagacaagtcctgggcggatgtgaagccgcttgtgtggaatgataaggacagtttgaagaatgactacaagactatgccggagcactgcgagtatcaatatgtcgcgcagacagaagggaatacgtactctggtcgtctgaagtatctccaaagttgcaggagtgtggttgtctcgcacgagctggagtggatccagcactactatcatcttatgaaatcgtcaggacccgagcaaaactttgtccaggtgaggcgtgattggtcagatttggagcgacaaatgcagtatcttttgtctcacgacgatgaggccagacgaattgcggataacagcgttcaaattttccgcgagagatatctcagtcctgcggcagaggtgtgctactggcgtcggttgatgcgagagtggaagaaggtcattgatttcgagcctgaattcttcaagatggtggatgggaagaaagaatggagaggcatttccgtggagagcttcttgttgatgggagagctggagtatgatccccgatgaaggcactgaaatatatacatgtgataccccgattcgaagcttaaatttggatcctttcccttattgactaagatacttcgcagttgggatatgctgaacgcgcgagctgggtattattcaactggtttgctggatagcccggtatcagccaagcccacacttatatagaagtaggcgagaattactatactaaaggctacaattaaactatagagattacttggccccctgtaaaactagtgcttcattcttgtgcgagatcaacatttattcgccaagactgttttacgcattccgacccttttccccttcccccccagtgccttcgtgactctgctgcaaaatactaggtaggtagtactcaattaaagtcctacattccaagttcttggaaaatgtgttgttttgagactatgtttacccaaccacaatgatcgtcgcgtgccatcgcttcttgggagcaactacttaaatactatgagacgcaattcctcgtcaggttcctcgaaccaactactttcacaacatcgacactctctttaacgcctttcctagccggagaattactttctttacccaacaatctttactcccgaccaagatgcacttctctaaggtgattccacccctcaatcgttatacttagatgtacacaacttgctaacacaaacagacccttgccaccgcggccacctttgccatgactgtatacgccggcttccctgtcgccagcgttagtttcctctcatgggagaagtgcgacattggccgccccgcactcggcgaggccaagttctccgccgatgtgagcgtcactcctgtgacatgcgacaagacccctgtcaaccgtgactggagcattgacaactattccttccgcgctcgcttggataccaaggacaccgttttctgccacggcgtgaccatctggaacaacgatggctgctctggtgagcctgtgtacttcctgcctttcgaacacagccccttcgccgagggccagtgtctccctgacatcctccagcctggctatgtctctttcaagctggcttgcgagggtttcccctagaggcttaatattcgatttccatgcaatcatgacttccgagattgtcatattggattctatgaagaccttggatcggcgatagatacctacattcattcattgtctgttttctcttatgtgtttcttacttggccctggctcacggataaatctggtattaccgagtacttcctaggctatattttccacgagaccacacttcatagcataatgtttcctaccgaccggcaaattcaacaactaatttctcttccatgaagaacatacaatgcatagataggcaagaagcatcaaatgttggctagtcctgagttttgacgctcatggttctgtacatataacatgaggatatcaaccttattacatggttaggctactgttagcgtggcgactactagtcccgaaattagctcaaccaagccaaggatgatgtttattcaagctggtcaatgacgacgagttcaagtaatctcgcttgacttaccgtgtcgttttgctttgttaagcactcaactatagatcactgaacgcttggcaactgccaaatctgcgtcaagcgaatctagaaagccaacaaaccagactcaataatcatgaagctaaaaagtctggaattctagcacctttcggtagcttattccaggaagatactccaaatttggaacggctaactacgcatagagcttgctagcttcattgccggaccctctgactgaattaatacggcagtaactgtatgacacggttattagcaaattacataacctgtctgtaggatagttcacctgcattccaaatagcgctaataccaaaattgatgggcagtagacttctcggcatggaaacaaggttggagacacttgtctgttctagtcctcctctgaatttgagtctttggcagatacagacaggcaagaagtagagaagaggggtgggctgggaatcagaaattctgtctaatccggcgagggaggcaaggaccgaccacatggacaggtgacacttgcagctgcgctcgttaaagggtctcattgttccttctcctgtcccatattccaactcatatccctattcatacacaaccgtacgactatcatgcctacagacccgaaaattgacaccctgcaccatcaactcttcgaagaggggctgaaggtgtgctgggaggatccttggcgacgagtacatggaccgggctacccacaacgccaacaccttcccccggaaaggggctcattagcgagtggctcccatcttccattcctatctgtacccttactttattaaatattatcttttttatcttcgtcttatatgccttttgccttttcctatctatgggtacttacacgtctgcgggtagttcagccagccatatatgaactcctttccaacccattgctctcgatgccaggttgggctcgtactcggtttcaaccgggtatgagccgcggatcctataattctgctgcccggtaccttagcttagttggtactactactccgtactctatatctatcatatttgaaggatttggagcaagctggagtgctaatacctagcggcgttctgtagatatagtgaagtgaagaaataccctacccataactgctccgtaccggttcgtacatctcgcaaattcaagcaaggagatctggacgcccaagggtggccgggaattcttgtcactgtctgcatgcaaggtgatcatttggcagcctcatatatcattcttcttgtgagattatgcaggggcataggggctagggttactttcggatttaatgcaattcattgaggccttgttgcctgatgttggccttaatactgaccgcttcttggagcgaagcgaagcaatcacaaggtcttcttaaaagttttcgccatggaataactacctccaactcgacaacttttttaccaccttactctatcaagataagctcaatagatttgatttttattagagtgttttgaatttttcaggtcccggtatggcagtcaaaattgaatgtaccttccagagaaaacaaatttgaggtaaatatctgtcgctgaggtgatactattgccgagtctacggggtacgttgtcactattcagctgtcaccactgaagccctattcggcgtgccgtctgccgggtgccgcctgttgtgtaccctctgccgcttgccgtctacctgttacttcccgaagctaaagtcgtaaaaacctcttatattagatgaattaccaattctctattcaatataataaaagtcaagtctattgatatcgagttttgtagggttatcactgaattcaggctcaaaccgcctaagaatcatgcgatgtatggattgtatggcaaaaatagctttatattcatggcgccagatgcgcaggcctccgtaataggtatcttgatttttctgccataccaaactaaggtattaaggcgccattgtatgcattaaatccgaaagtatccctggccctatgcccctgcgtaaaaaattggacgggatctcgaggcgtttcaccatcagagcagtctatttgctgctcatgttgcggattatcggtctggaacgctgcacgtggaaggcaccgtccctcagtgttgcgtctcaatggcgagaccgacgatgccagctgaaggaaaaccttcagttcatagccggatatactgagaggatataaaaagggctgtttattcccgctgcattatatccaacaacattccaacgggccattctgaaaataatcgagtatatgaagagtacaaaaaccccgataccttagttctgctgtctcgccttcgaaagttctacatcatatttcctttaaaacaaatcacaatgccttccgccgttcggccttctgagatgcacacccatgttgccattgtcggtgccggacctcgaggaactagcgttctggagcgtctttgtgcctcggcacccgagtatcttgtcccaggggcacgattgaccgttcatatcgttgatccatcgcccccaggcgcgggtcatgtctggcgtacaaagcagtcggatcaacttctgatgaacacagtcagctcccaggtgaccttgttcactgatgatagtattagctgctcaggcccaattcgtccagggccaagtctctacacctgggctgccgataagatccctggccttggacctgatgattgtggaacccgtgcccagtacggccaatatctcgaatggatcttccaagagactgtgcgacaagcaccacctcaagtgcagattgaggtgcatcctgcttttgctgtccgcttgtatgacacgtcctatggccagcaaacgctcaagctgtcgaatggccgaaccctttctagcctcgcagctgtcattcttgcgcagggtcacgtcccgcttctgctagatattgaacaactgaaaatcaatgcttacgcagagctaaatggccttcatcatatcacgccctcaaacccggcggatgttgatctttctgttattgctcccggagagaacgttttcctgcgtggtcttggtctcaacttcttcgattacatggccttgttaacattgtcccggggtggtagcttctccgaaactcctaacggcttgaaataccacccatcgggcaatgagcctcggatgattgccggatctcgtcgtggcattccataccactcccgtggcgacaacggcaaaggggcatacggccgccacatgcccctcgtcttcaccgaagaagtaatcaacgctttccgcaagcattctgatgctggaaaagccccagacttcctccaggatatttggcctctcgtttccaaagaagtggaaaccgtttattacttgactttgttgaaacgcgataagttggaccagaccgacttccagaagaggttcctagaaactgagccaaagagcccggaggaagcgcaagtccttcgtgactttggtatctcggaagagaagtggtggtcctgggagcgtatccagcgcccacagggagatcaggtcttcaatactaccactgagtggcgtgagtggttgatcgcctaccttcgtgaggatgccaaggaggccgcccttggaaatctgaacggtccactaaaggcagctttggatgtgatgcgcgatctgagaaacgaactccgactcatcgtggatcacaatggtttgaccggcgcttctcatcgagagaatctcgaccgctggtacacacctctgaatgcctatgtgtcaattggacctcctcgccaacgtattgagcaaatgattgcgctcatggatgcgggggttttggaagtccttggtccccgtccacaggtaaaggctcaggacgaggcttggctagtccacccccccgcggggnnnnnnnnnnnnnnnnnnnnnnnnnnnnnnnnnnnnnnnnnnnnnnnnnnnnnnnnnnnnnnnnnnnnnnnnnnnnnnggctgggctagtccactcgcctgaggtaccaggcgagccaatccgtgttaccacattgatcgaagcccgcttgccagagccgaaactccgaaacacgggagatgagcttctttcccatttgttcaaaactggtcaatgccgcgctcacacaattgacggatacgagactggtggtcttgatgtgactcaaagcccataccatctcattgacacccatggccgtgcgcacccaaagcgatttgctgtcggtgttccaactgaaggagtccactgggtgaccgctgctggtgccagaccaggtgtgaactcagtcacactttgtgacactgatgccgttgcccgcgctgctcttagcgcagcagctatcaaggctaagatcactcagaccaagattgatgtgaagacatttccctgtattgaggtgtccaagctccgtgtccatgcttgaagcgagtgtggttatcatgtgcggagaaaaaaagagagggatatattggtgaaagtgacgaggaaagcgaggaatataccggaatggaaagggagaatgtgacatgccataaattttcaaattgatatttttatgtatttgtagttcaaatcaatgtttggtttccagagatagcctgatcttattgcggagcggctattaaatgaatgatcttaatatacaggggtatcccgtagaatgaatgaaacatatgcacaactgaacatataagacaatagtaagacaacagctatcgatatcgaagagatcatgtacgctcaatcgtgaattgcaaagacacctcccatctttgacccccggtgccatacccaccacctagcctgttgcgaatcaagctagatatcttctcccgtagccggacaagattatcctcagatccgttgactcggagcttgaggtttgccatgcacagcccataatggacctgccagaatcgagcgtcgtcaatgccgaacacagcagcgtcggcttcaatatccttgataacatcagaaactccttggccggagtaggacatgagaagcatggagcctagagttttcaccaagcgagttcccaggaagcacattgagaatgcaatggtaccagataagagcttatcgagccaatcatagatccggatcgagaccagaggtagaagcagcagcagagctgaacaagagagggtgagaaagtgggacgggttgctcaagaccgatggaagagattcgatgtacccaaatcgcatagccttaccgattcgagcgtggttcttgagaccaatggctgacacgagcgttgatgagatagctagaattgcagtcacatccacactacccagagaaatccgatcatggtcatgggggtgatgaggctcatgaccagccttctcgaggaaatgctgcaaattatgggagattagatccatccccataaataaaagaagcacagccatagcgaatccggctaaaacttctgcacgttcaaggccaaacgggtggcggatagttgatctcttccaaacttcaaaattgccaagcacatctaccgcaacacataatagagccccgagtgagtcaaatagaatcagatgtgacagtgctgtcatggccaaggatccatgtgcggtccagagcgtgtatgccgcaatgaacatatggcacacactccaccagaagcgggtcttttgttccttcgacatgctagatcggcattctttcagtgttggcatgggcaaggagttcggaagggctaggggcgcgcgaggaggaggctcgaggaagatctggtgcgagatgctactgtgcttgtacttgtggccacgacgttgtcccatgttctgaaacacgagggaataagttaacaatgccgtcgtcacaggtcatcagcgcaattcaactcaccgatttgatcactgggctcttcgccattacagtagtattgaaattgaatggcccggcggatgtgtcgcccaagccattctcgatcggcgtctctgcatcttcaggcgaggttgctagattgaaagaagactttgtggggctcagagtatttctgatttcggcgtccatgataccctttgtaaaggaagccttaagcggtgatagggaattgcgatcgatgggtatccccgagttgatctgggaggcatgttcgtcgtccgctggtggagtgggggtgcgcggggggagagggagaggaagattcgaagccatcgtgctggctttacgaatataatgcctttatgaattgatgtttcctatatacacatgagtacatatataagttcagttcggggctatcactccccccggacgagctccaatgtttctgccgaccatcacgtgggcggcctaaaagcaccctgaagtctgaattatgagataggttcaagggtcgtttggacaaaaacaggtaataaactagtctcaatgtttattctagctgggctcaagtcttattcgatataagcctatgacctgcagaaacatgcacaagtacggaagactttattttcattggttgtgataccataagcgggcgtggggccttgttccataccgagaggccatttttcggacttcatctcaataacagctatatatacagatatacagaggtataagtagttgctgtctagcatgtgggcttatgggggtttaggcgaatgagtttatcgggggagggcccgggtatgcatggcaagcactatggactaacagacttcgatgtaattgttcgaagaaactagtcatttgaatcggccaggatgaaataggtacaacgagagtaaaatttgatttgtttgaaagaaaagtcgggttcggacctggtatatgaatacagagtcatgaaatcagtttgcttcgcaacgctcgtttacactatttcaatatatcgcttcaactccctataaccgagttagtcttgcgtttataggttgcacagtattttcaacttaccaatcagtcacagcttctctccaaagtcccaattcgtgctgtcttgtggctgtgaaaaagtctacaaactccgagctcaaaatctcccgcgcaatacttcccggagctgagaaacggtccaaagccttgtccaaagtattgggaagaagttctggacggtcctctggcgtgcgtgcagacatcggtgggaccttgatctcaagctttttctgtacacccctccagccggctgcaaggatgacactcagtgcataatggggatgtagatcagccccaggaatgcggacttcgaaacgcgtggcacctggcttgcatactggtggcgtgataagacggattgaggcaatccggtcctcgagtccccagctaatgtgcactggtgcccagtagttctccacgaggcgcttgtatgagttcacagtcggcgcaaacaatggcatgatatctggcagagcttccagaagaccagcaaggaaatgacgtcctgtttcggagaggtatgcgatgtccgaccattgagggttcgcctcgggtgtctctcttgcaaacagattgttcccatccttgtcagaaagggagatgtggatgtgtccggagctgcctggcatgccttgcataggcttagccatgaagcatggtgtaatgccgtggtcaacccctaaggacttggttaagagtctgtcgacttgttagagctagaagcaacatttgcggtatttgcggcactcacttgaataatgccactttgtctgccatttcactaatttcggaaaccttcaaggcctatgtagagtgtcagagtagttcacgggatgacctgaacggatgacatactgcttcatagacaccgggccctccctcagtgtgccatccttcaatgccacaatttatctgcgcactggtattgaaaatatcgtagaagtacttcttgttgacaaccggtcgcgttgaactatagcaaaacatgccagctgtaattggccgcaaggcactaggggggtttttctctaagaaggtagcgaggttggggtgctgggagcctgcactgccgtatccatcttcggaaggagtctggaagttcataaattcgagttcgactgtctgatatcagctttttagactccctcgccaaaatttcccgtgacttacctccagctaaagcatgaagcccttcccccgcaagcctgtcacacagactcctcaacatacttctcccatccgcagaaaccgggcgtgtatcatcaagaaaacgcactaggaagaaagggatattttcttcccaaggtagacggcggaacgagttcagatctggaacagccaggaagtctgcgtaccctgattccgggggcgcgatccgagcatcagttgtccatagcatatcgtgcatgtcccagccgaaaagagctgagctgaagccgaatcccttttcagcaatcccaaggaacttctccttggccataactttgccacgaagcactccatcgctgtcgataccggcgactttgactttgatgtcatcggccagaaggctggggagtgattcgagagtgattatagtgggcgtagtcattttggagaaatccaacaatagcagcaggactaactagccgagttcaacaattggggtgtgaattaaaagagacatttcgccggcccctgtggctttatacaattgcgtgaattgtgggttgttgaagttgcgggtccaacatgtggtcgacattaatgccgcgcatcactgagaccgaaaatatccccgcgcggtgcagatggtagacaatagcgcgtactctctttacacgcaactttggaaaacaatggtcataggtgaagctatgatgggatgtgagatgctccgcggtccgcgctgtggggttccgtagatagcgcgcttatcctgtcgaaatgatacagagcttgagagtccggctttggattaaattgtattaacctcatgtgttcattgttcattctgaatctaaagtggaagtacacattctccagtatgataccctccattcgcattcatatcgccgttctcgtgtgtgacacgcctatccagcctattctcagaaagtatggcgactacttttcaatattccaagaccttttgaggaaagccttgaaagacttggaaatatccgagaagttcaaagatattatggtggaatttagtgaacatcagatggtggacaacaaccgatttcttgatctagaggacgtcgacgccattcttctgactggaagtagtatgttaccattcactttgatatccgaatggggcaactaacactacttggtagaacacgacgcctgggctgatgaccagtggatccgtgacctcaccggcaacgttcgtgagactgttttaaaacacgaaaagccggtgattgggatttgctttgggcatcagattcttgctcgggcgctaggggctcgagttggcagaaacgaagctggatgggagatttctgtcgagaagctcaccctgactgagaccgggaagaaactatttggaaaggatacactggcaagtggagaaacatctggacaagctcggttgagggaaattctgattggatacagagcattcaacaaatgcaccgggatattgtctttgatgttccaatcggttgcgcaaacctggctacaagtccaaaatgtgaagtccagggtctttacttgcccaatcgagtgctgtcggtacaaggacacccggaatacaacgaggctataatgtcgtgcctgctcgaagccagacatgagaatgggatgtttgacgatgaattatataacgatggtttatcccgaatgggtgattcccatgatgggtggttaatagcgaaggtaattgcaagattcatagtagattcgaaggccaaataacaaaacaaaatgatattgttagaagatcgagataaacactaaaagtgcaagaaaaaataagtgagataagctgtcagatatgcaaccgcgccggctccgcgctataaattccacctctcccaccttcgggattccactctttttctcaccagatacacaacctacgctatgtcaaaccagatccgtacagtctgcccctcaacgcacgaggtcatttttgaccagcctggcacttcactcaaagaagctaccaaagttgctgctgcctcaaagcaagcctttgagtcatacagaacaacctctctggaggatagaaagagcattgtgaaaagagcattggatatcattgaggagcgtcgcgatgacctcgccaaagaattgactgcgcaaatgggacgacccatccggtactgtgcatcggagatcaacactatgcgtctgcgcgccgagtacttgatggatattgccgaagagagcctatctgatctccctggtcggccagaagccggcttccgccgaacagtcaagcgtgttcccgtgggaccggtacttattgcgggtgcttggaatgtgagtgagcactgctattgaagtatcctcagattagctcatcaatatgatagtatccttatctgactactgtcaatgcccttgtcccggcacttattgctggtaacagcgttatcctgcgcccttcaccacagaccccgctatttggaaatagactactcgaggtctttactgaggcaggacttccgcctcaggtccttcagatcattcacgttggagatctggatgtcttggatcaggtggcacagattttcgagatccagtctgtctcattcaccggttcaactgcaggtgggattagactcagggaggcaaccgcccatcacatcaagcctgttaacctcgagcttggtggaaatgatcccgcatatgttcgtccagatgtcgacgtgaagcatgttgcagagcaactcgtcgacggagctgttttcaattcaggacagagctgctgttccatagagcgggtatacgtgcatgaaaaaatttacgaggaatttgttcgcgctgtgcaggaggagctgaaatcgtgagcttgactacgttcgaaagggaatatctctctgacattcgaatcaggtataaactcggtgatccacaggatgaaagcacaactacaggccctgtcatctcaacgcaggccatggagaagatcacttcccatgtcaaagacgcgattgctaaaggagccgtcaactctactccccagaacctaagctttgaggtagcaaccaaccctcaaacccaaaaaggtaactttgtctctccggttgttttgaccaatgtcaaccataccatggctacgatgaaggaggagacgttcggtcctgtgatgccaatcatgaaggtctccagtgatgacgaagctattacattgatgaatgacagtgagtatggtctgacggcgagtgtctggacgaaggatatcactcgcggagaggagttgatcgatcgcattgaggccggtacggtgttcattaatcgctgtgactatccaagcccggtaagatattttgacaatttatcgacttttcgatggctcactaatgctaatattgcacattaggaccttgcctggactggttggaagacgtcaggtttgggatgcactcttgggccacggggatacgatggatttgtgaagctgaagagctaccacatcaaggatggctcagcatgagtaggcgggtttgaagatgattaaataatgttgtgatctagaacaattcaagaaatctcaataccgttatttattggatattgtggcctttggccgtcacttgtatgcctcagccatagacggcatagaccctcctacgtaggacaactctcaccctcacacagtagccccgcaacagtttcattcaactattcaactgtccgatccgagcatgtctcctacaatttgaacacaagaattcaccatagccagctcatgaggtttgtaattggtaacccccgggcctgtgagcatccgtgggatgctttatccaaagagacccccactataggtagcgcggtcccggaccgcgctcccttaggcccaagacccaaccactaccggaaaatgcttcatgcacttgaacgcgtgaagatctatctaacagctacccctcatgccccgcatgttgagctcaccgcgccatcgggtggggtagtaggagcgcgatggagctttgaacttgtaccacatttgtgtgaattgagatgactcgaaaaagggaaaaggggggaatatagcgcgttgacccgcgcgggtggtctaattaccatgtggacttgatatcggttggagctgctccggtatggagattgtacaatgtggactggagattggagaattggagataggaaatgctataaatccaggccgttaccaagagccctctgcagtcatttttattcattcttgtcaaccacccaaaccgttccattctccctagctccttcaatcatatcacacacacaaaatcaaaatggttggacgtcttgaaggcaagaatgctatcatcaccggtgcagctgggtatgtacctctatcccactatccaaccgaacaataaaagacagaactaacaaaagcagaggtatcggtctcgaaaccacaatcctcatgctccgcgaaggcgcctccgtcctaatgaccgacattagtgaagcaggcctagacaaagcactttccaaggtgaacagtgtcgtgcccgcctcaacccgcaccggaaaggtcgagactaaagtcgtcgatgtgtcaaatgagtcccaaatcgaagcagcagtcgctcatctcgatgcctggggtggattagatatcatcttcaataatgctgggatcatgcaccccaaggacggagattcggaagagtgtcccgaggatatctgggatcgcacaatgaatatcaatgtgaagggcgtgtggtatggctcgaagcatgctgtacgcgcattccggaggcatggcaagaagcgcgctagcgtgattaatactgctagtatggttgcgctggttggggcagcgacaccgcagttggcgtataccgctagcaagggtgctgtattggcaatgacccgggagctagctattgttcatgcccgcgagggattccgattcaattccctttgtcctgcgcctctcaagtatgtgatatcttggcatttccccgttcaaaccctttgatggaactgacattcagatagcacacctttgttgcaggattggcttggtgacgataaggaaaagcgcttccgtcgtgaggtgcatttccctaccggtcggtttggcgaggcgattgaacaggcccacgctgtgatcttccttgctagtgatgagagcagtttcgtgaatgctactgacttcgtcgtcgatggtggtttgacaaaggcatatgttacgcctgagggtccggcgacggaagcgccgaagaacttggctgcatgaacggatggtgactttgctaggttgtacataatatgagtaacaggatgacgctcaacatcatgcaaatgagatccatatttggttttgctgcattgcccgagaaatattccatggcccggcctcggacgcaggtgattcccacattgcttcgagcagtagaagtgttcggttcatattaccaagaccaaatgtctcggtcatggcattcaatcgtcctcgtaggcaattctgttggtcggggttgagaaggcatgagcccaccacagcgatcggccaacagagcccggagttgatgcgcgcactgggcgacagctcatccaggtatgacatggcttctgtcacgacattttccaccatgcctttatacattccatctctggtgtattggaatccacctaaagaggtgtacagatagacgagtatggcttgttggaaaattagcccagccagacggacctccgtttcgacattgggataaggtgaccagcgtagaatctgggcttggatagatgcaaacatggcaatatcatcagctgttggaattagcgcctgcgtgtcgtccatgatccactgtcggccaagatcgaagatacacgggatcagcagcaatagctccagccagcaaccgcacaagttgcccacgtactgagtctgaagtaattcacgcgaccgttgttcgagatccaagtttaagaagatttgcccgctaaagcgagcatcgattgagatcatgctgacggtcgcagtataggtgtagtattcgatgacgaaatctttcaagtctcgtggaactgccgagtcactctgggcaagcaatttgactaacaacgagttggcggcggataagtggtcaaatattgtcccgttcatatcaccctttgctgtctgtttttgtcagattgttgaacccactacttttgaatcatggatttcctacctcggtaaaacacatcagaagtgccccaactaggagcacgagggggttcgattctttgccgttgataaagtctgttactccacggcggaaatgctggagggcttttgagtagtggctgtgggcaattgtatccgattcatctcgtgaccgaaacgcgcggtgagcggcgctttgagtgattaccagctgcaacagcaaatcactagaaaatgccaggggtacaatctgtaccaggaaggggttgacaggcgtggagccatttgccatgcagtcggctgttgtggccacgtaatgactgagaagctgataagactcagcatcatatccaggcatcatggataggctgcgcggcagcacgtttcctattgagaaagaggcgacaagagaatcactggaaatggcagtcctggtagacgttgacacttgtcgtcgattatggatctcctcatgcagcgttgtgtcttcaaattggtctccggtagtcaccgagtgccctgaactcgaagaaatcgatggcgttcggtgagttgagggactcctaggcatcgccatttcgtgaatttcttcggaaatattcgctcggcactcatctacagtaggtgcttgagtttcgtcctcatggctgggatctctcttgccaggtacatctgggggccactggcagcccaggtcattgcgctgacagccagcacagattggatgtgtctcgtcgcatttcttcttgcgacgcctgcaggtcaaacaacctgttcttactcggacaattcgctgcacacgtcgatctggcggcatctttgattagaggagatcaaaagaaggcaggagattaaaggatctcagcgccaatctaacggttatctctgggtagagataagaaagtgtggggtaagccgagccggccacttctattcccgagcacgtttagagaggtttgtacaaaaatgggtttgatgggcttgatggtttgaatggttttaatggtcttgatggtcttgatgttcttgacaatctttctaatatgaacctctttaactgtatatcgagcttcgttcggcagcaaatgatccatcgccacagtattgcatttatctagaaagccccagacctcagcttccttatgccacaaatcgttatatatgcagcactctagcacggactttcacagaacatttctggaaaactccgagtctgatcctaagttattccccggcaactcaagggtcagccacgaactataaaccagcggtctagactcgttaatataagaaaaatgtaacgtaaatcggactaccgaaaacgatcggaaatcggacatccgaagatacataaacaccggcatatattgtatagatcaatcataatgtctccagcaaatctgcgtgatcccgggatagcagcctgtttgtatcggacataaaaccaacacaagtgtcagccaatgaaaaatatcccggaaccgggagaaccctataccggcttcccaatgtggcatatggtattggcgatcagccatcgcacgtgacttatgtgccgaagacccgacaatcaacacctgaggctgcaaacggagccacgaaataccgcttctccccacatgcacactgccttaatgacaacccaagacgggtcaagccgccggtattcaggaaaatttgtgataaacaaaggggcaaatggggtctggccaggggtcatccgtgtcaagctttgggtaccagccaatcactatgcacaatattccaaactggagagctgtgggttttcttctggcggtgttaaggtccttcctgctttatcaccgttcgcaatggttggaatatgccggctttctgcctgatggttttttattgtggctattgatttgatataaaaacgttccccgctgttgcagtctggtcctttttctctagggaatcaatcagtgtcgcgtgcccatctagttggcttcatatattaaaatttttcagtcctttccccaattattctcgattggttctccgcatgagcatcgataatgtcggaccataaagaatctggctcgactagaccacagtcggcatcaatatccagtaccgattccgagtttcaggcatcaagaacgcagtcacgatctcagagcttggctggttctctacggacgaggctacggtctctgtcaaattcaggaatgacccaggtagatcgagtttattcgggtcgacatctcaatgaccagtcggtataccacagcgatgagttcgatgggtccgacgatgatgagccgtctgtcggaaacgagcatatgcccgatatcattcaggaagtacggaacgggattgtgaacgaacgcgatttggatctagaaagagccgatactgcacagcctgaactggagaaatcaaggacatcaaggtcgaaccggtctcgtcacgacccaaaactggtaggttgttccatgttcctaaatctgcattcgatattaagttgtacaggtacaatgggatggccctgaagaccccgagaacccaaaaaactggagcagcaagaagaaatgggctgctgtcatcaccgtatcactattcaccttcatctcgccggtctcttcgtcaatggttgcaccggcactgccatcactggtagcggacctcaaagtcacagacgaagtagtttcacaacttatgctctcaatcttcgttctagcctacgctgttggcccattattcctcgggccattttcagagatctacggccgaaccatcgttctgcaactcgccaacctcttcttcctagtcttcaacatcgggtgtgcggtctcacgaacgaaagtccaaatgatcgtctgccgattctttgctggactaggaggcagcgccccgctagcagtaagccaagccgcaaaactccgctcaagaaaagcttatatctaaccacatctagatcggcggcggggtcctttcagattgcttccgggctgaagagcgcgggaaggggattgcaatctacagtcttgcaccactcctaggcccagcccttggccctatcgcaggaggcttcatcgccgaaaacacaacctggcgctgggttttctattcaacctcaataaccgacggcctaatccagctaatgggcctcttcttcctacgcgagagctacggtccgaagatcctcctcgaccgcgccgtccgcctgcgcaacgaaacgggcgacgaatcctaccaaacagaagcagagcgccaaaataagaccttacccgaagtcctgcgcagctcgctcatccgtcccttccgcctcctcctcacccagccaatcgtccaagtcctcgccctattcatggcctacatctatggaatcatgtacctcgtcctctcaacatttcccaccctctggacaagcccaaactattacaacgaatcaactggcatcggcggcctgaactacatctctctcggactaggcttctggctcggctcacagatttgcgccccgttaaatgaccgtatctaccgccgtctcaaggcccgcaatggcggtgtcggaaaaccggagttccgcgtcccgctgctcttcgtcggcgccttctttatcccctctggcttgttcatctacggctggactgctcagtaccactgccattggatcgcaccgaacatcggtgctgtactgttcggtactggcaatattattgccttccagtgtatccagacttatatggttgatacctatacacggtttgcggctagtgcgcttgctgctagtgcattcctgcgctcgctagctgggtttgggtttccactctttgcaccgtatatgtatagtgctttgaactatgggtggggaaatagtttgttggcgttcgtggctattgtcatcggggtgccagcgccagtgtttttgtggaagtttggggagacgttgagaaaaaagagtacttatgcggctggctaggtccttctgagtttttttaacattattatgcttagaaggggtttttcaatcggctaactcaatatttaattcctttgctgcgaaagtaagaagctatggcgaacacggctgtttttttggcatgtggccgagattgtcttcatgaatgcctcgggccctataactgatactttatacccctggtttgtttgattcaagacacggaatttatgccgaagcacatgtaagttttccttggtttgactctcctagactttctctagtcggtgctcgatctgcaggggtttccaaggtcctcgttagttacgagttacgacacacaaattggaggttgaatctgaatggaatgccatcgttaattcgaccagctttgcacctaaaactcagtgtagaattatatatacgatattgtcaagccttatttactttccatcttcacataaggagacactaatactatactgtgctgatggtagactgtaagggcaagaggggacatcaaaggtatttagatccgttacaacaatgtttagataaaagaaagattttatggtaaaaagtatgtattcaaatcgaatgaaatgtcgagaaaagagaaagagatcgtagagcagactattcacatactagtctgcccgctttcccgttagacacagggggggtatagagattctatggtcacatgataatatgagatccgaaacagatgattaattcgattcgctccgcgaatctcactcggccgacatcaaccaagggcaactgacgattggagcttttactcctcgtgcttggtatcgccattcttggcctcactgctgctgctcatggcagtctcggccttctcggcctcagtgttgacctggaggtcggaggtatcgagacccagttcgttctggaactgggtaatttgggcaatggtgagcttgggcatctcctgtgcgacccggtaaggccacttgccctcaacgtgggccttggcgaagatgatgtcaacctcctcgagatcacgaccggcggtctcacagtagaagaaccaggcgaaggggatggcgataaagttgataagcgcgaagaagaggtagataccccagtcggactggttggagaacacaggagtgaacatgacgacggcgaagttggtaatccagttcatgcaagtggaagcggaggcggccttcgtacgagtacggagggggttgatctccggggggtagatccagggtagaggcagcgtagtaaaggcgaagaagcagatgaagaggaagataccgacaatcgcacccttggcgttctgcgagttcgacctgacgagacaacccatggtgatcatgaagctgagaccctgaccgaggaaaccaatcaagaacaggttgcggcgaccgaccttctcaatcataaagaaggatgggatagtggcaagagcgtagacggtggcgaaaacacctcctagaaccaggggaagcttgccctccatgtgcaagttctgctcgaatagcagggtcgagtagtagatagcggcattgcaaccagtgaattgctggaagaactggccagagcaaccgatcgccatacgctggaagtgctgagtcttaccaccagtgaagaggacacgccagctactagcctcaagactctccatggccttgagatcagccttcatcatgttgaaatcggcaagcacatcgtccgcatcgacagcactatcgttgagctgcgcgagaaccctgagggcctcctcatcgtgaccctgcatgacgaaccaacgaggcgactcgggcagcataagagcaccaccagtgacaagcgcggcgaacagaatctggaaggcgacggggaatcgccactgaacggagctgtcgacataagagagaccgaaatcaatccagtaggcgatgaaggtaccgacggcgatgatagcaccctcgaagcagacgaggaaaccacggttgtgagcgcgcgaacactctgactgccagacggggatagtcgcggtatccatgccgtttccaagaccagagatgacacgtccaataacgaactggcccagtccccagtggggaccgaaggcagcagtagagataactgtaccgatgatcatgaggataccaccggctaccaggagaggagtgcggccaatacgctgaccgtacatcattgtgaagatagcaccaaagaaacaaccaagttcgtaacaggcagtgactgcaccgcgcaggacggcgacgtgttcagagtcaccatggagaggggggaattccttggtgaactggtcaccagagatgataccggacatcaaaccctgatcatatccgaaaagtgagaatccaacgacggatgtgaaggtgatagcaagatggagcttcttgccccgtaagccggaggttgtggtccacatgatcaacgtcctctattagatgagagggaaataccaaagcgacataagaagaaaaaggaagctcagacaccggggggaatgtttctgtaccttatatgcattcagtgcgcatgtccattgggttagtgccaagaagagaaaagttcggagtgacatcggcggcgcttcaacattggataggcaagtcttgcgacccgccgtgggggcccaggaggggctaaggagggggccaagggccaaatgagtggggttgcggggatgcaacaagcaaatctcgcggtctgccaagtgctccgagcggcgtgtgtttaccgttttgggccttgggttatctatctcactacactaactgagcaacgttacatggaatggcgtatattcgttaagatagcaggcttgctcgtcttcttattttctcgtggcttttgtggggggtggatcacaattcccggggggcgtctggaggcgtctggaggtgagcgacgatacttagccggaaagggaatcttacccgaccctccacgacctccgcggccaactccacgacctgcaagtactgggggaataagaaattagagggggggggaaggtgggtcaggggccgaggatttcattgaatggccattcgtcgaccgcaattggcagtccattggtttttctttttcgcacgctcggtgccgattggtgtggcccgaatattacgtattcccatgcttccaacgatctcgtgaaagtttccttttttcttcggaactgcgtcgtgcccgatgccccggccggttacggcgacgggtcagccgtggactgcaataatttcccggggttctgaggggatgccgtcttgagcaatgatcatcgggatcacgagccatattcttctccatattctactccatactctactccatactccgtggtcacatgagaactgtgggatgtagactaacggcttgcggactcaacaacagaacgtcccatctacggggtatgagtatgcccgatgcagcccttcccgaagacaccatcccgaagaagcatcccgagaaccatatcaaagagagtcaaaaaattggggaggaaaagtgggcggacccattcgccaagatgattccgcattaggaagggataaccatgtcaaagacagcggatttcgaaaacttttacaggtcaaccacacttccaagatcaggatatttgcttactccttcttggctcatcaaccaagccttccaagtacatttccaagaaaattccaagaaagcgaagcatttgacaagcatagcttggttatatgcctattctggccatacttcatacgccgtatgggagaaaaaaaaaattattcacctgggcccacacaagatttcgggaaaacactgaaagtcaagcgggcattatcgggcacttcacctccgatttgatatcttcgccagtaaaatctctgctcgtcgggatatgaaaataatggaacctggattggtagacgtgcatgtgagcagggaggtacaagcctatattaattttcctattggaccaataacacaattccccgagtggttgtacatgtaacatgggcgagacaaccctcggtaccttcgcgaatcagaacatgcgctctgtccgcgatgatgccatgttagatttgagtgcaacgtacatatctcttggcacccgttaggcgtcgtcgcttaggagggtccccgacatattgtacgagacgagggggagccgatacttcgcgggagtgcagatcacggcaaggccgttcatagtccaaagcgaaactcctaaaacgtcatagtaaagcgccttctaagtatgtggcgcttcgagggccttggcgtgccccctcaagttcctcgtgggaatcatgggaaacagattgccatgtggccagcaactctccgcaaaacttccttgagatctgagagacctcgggtgttacttggaaatgaatcccactatccctgattggtttgtgtaatgtcgatctccgttgagatctggcagatgtgaagccagattgatcagggtagtttgagctatagcaataatgtctgtaattggattatggtaaaaagaaatcattgaaatacagaggtttgatcgggtcggcattcaactttgggcaatgcgtcaaagagtatttcaatagtagtttcagcactatctgaaaagtatcctgccaactctacatgagggcatcggcggtgtgacatcagtccataaacggtcaacgcgcttggactgcacccgcccatattatatcaaaagcatatcagaaaggagaaaaccagctttgagatagagggtcgtttctacactgttgtactcattttattatcgatctgtctatcttagattctgtcgttcaaaaatcggaggattattagtggagattgtggagatacatatttcctggggtagaggtaaactggggatgcccccatactcatcaacatagtctgtagatcgtacattggaagaaagtcacaacattcggatccacaatgattgtgacaaaatcgaagaactattttaatgtggtagaacaacatagtattcaatcaactttttaaacactagggtaactgcttatgttcacatctgacacggtgacagtgtatcatatatatatatatatatatgtcgattattggttcccagtgataccagactgcttcttaccgtgcttctgtaaattattagcattagaatcatcagagggaagaatgggaaggcttcataccagagtacgcgagtacttgatgcccaggttgtttccactggcctcgtcatacggcacaggactggtgtagtcgcgggtagcgtgaagaccgtggtaggtcttcttcacgaccttagcaataccattaccagcagagcactcgccatcggtgagaggaacgggccacttggcggaataatgcgagtcagacagggggccagggtaagtctggttgaggtaggcactgctgagatccacttcccagttgacgtagccggtcctttcagcgacaatgtccagcaggttggcgccacaatcccagcggccaagcgatggcagaccccagttagcggacagggaggcaatgattgagtagtgtgtgtagaaagtgtcgtcggtggtacccttcaggtgttgggggacagcgcctccaaccaggacgctgaagacccggttggggtgggtgtagttgcctgactcgtcaaaggtgagcaacaccaggctgttcttgctgaagtattcgtttttcaacaggggaggcaggaagctttcgacccagttgccggccacaccgatgttggtatcgtgagcgtcgttggtcatgttcggtgtgatgaacatgtgttggggaaggcggtggtgttccaggtcatcgtagaaagtggtgaaattcttgatttgacgcgggcgcacggcgtcgttggtaaccgagtcatacagaaccagcgggttgtgcttgcgcacgtactggttcgcgccgctgagggggtaccgcatgccctggtagccggcatagggcatgtcctcttgatactcaccccaagcgatatgcctggtatcaaacagatcggcaatggttgagacattggcggggatctgcaggaagtcgtcactgtccatgccaaatgtgtcaccaccggcagaagcacagtagttgggttccgaggggtgagtgacggcaaagtagttggtcaggaggataccctccttagccagcttggccaggttcgcgtctgcagcagcggtttcgtagtcctgcaaaagggtgagcacgtggtcattgctcgttatgcaagggggggacctaccgtgttctcgagccagatgttcacaaatcgatcaaaaaccaagcccctcacgtttgacacaggagagtaaggccgggctgtaagacggtctgcatcgatttctgcctgagtcgggttcacttcagtggtagtcttggccgcagccagggccagggccccgacgaacgcgagaagagtctgcttggtgaacatatctgggatcgctgtgatgagatagacaacaaaggagcagatcggtgggtcgaacacgcgatcttatactccagccagcgtcggaggcatgacattccccccatcggcaaaaatgcgctatgttacacggcactcttaaccgacaccacgttgtgatcgatgcagggctaactggctgtatttccaagcgtttttttctcccgagctgtcaaggcttgaatagaactgacctgaagaaattagagtccgaaatcaagttgatttgattggatgaatggcagatagtggaccgggtacctgcccgccgctggtccctgcgttgcacgttgttactgttcgtgccctcactggctgaccccctacgctcactggcccgccccggtcaggaacagctctgggctgaccatacactcaccttccttgagcaacgtgatcactatatattaatttgtatagtaatttctagattgttaataaaagcttttgccgaggagggacatatgcttacctcttcttggctcagaactacataactcaagtacggagtatgtgtagtattacaacaataatgataatttatacttactgaaggggagattatcatagacaccagcaacactcatgagtaattcttatatttcgtccttgcttggtaaaatgactgatatttaaggtgagctcggtatatagtacaaaaagcacttggttcgaaaaatagacaattcaaagccggttagatatatcatctagatgattcgtggatgccacgggcgaggaattatgccatttggcacttaattttcactggttaatactacctgaccgtatttactacgaagcattcatggatatatatatatatatcaggatgcttatcttctaagttggctatgataaatatgttaccaccatatgaatatactctttagaagggttttggctaacctctgtggtaggaagaatacttctacattaaaaagacaactagaacgagaaggccgtataggcagccgactatttttgtacccgtagctctcgcctgtacgtgcaaagatcgcgtgagtcgggaaggaccttggatttgttttcttcctttgtttctccatgaatataaggttcgaggctatttggtaaccaatgatacgacaaggaagagaataagagctacagtttgtgaacgaactgctctgatttaagttaggcctgagacaaacaggcacataaactttaatccaacctctaactccgtaattatgcgtgtatgccctaaaaattggtgattctggatcttctcattaacccttaacacagcgcaccacggctgtcatgccaatcctaagactatgggcaatttcgatggctctggtgaaggctatgaagccgaagcattgtagaatagctgagcttttgcttagacccacatacttttcatcaaattcaaatatatggtgctttgactttgacttcctttcaactctatccaagtagagctatggtggagttgctatgtgtatggtgatagggagctatatgacactaagagaagattcaccggagtttgttccttcggtttcaaaatacttataatatggaagggaggatagattgttttctcttgcaggtcacaatagtccgtatagcttctttgctgtcttaatctaaacgagtcaccgaggttcgcaaatacttgtagctttaacagcatgtgcgccgcgaatatacagagaaaaaaattcacataaaaaagtaccaatcctttgctcgttattcttgactcaatgactattacattgttatcttgacaggtaaaaaaaaacaacagaaagaaaaaaattaatggcaccatcaattaggagaaagcggcacgcggctcgttctccgccgacattgggccagacttgagccaagaaaaatcccctggtgacatgcggagggtgaaaagaaacgaaataagatgaggacaccagggaataacgtgcacgccgggagtaaatgtttttttacacagaaagaccgctaacaccgttgttgctcaagatttactcaggcttcttgccaaccatgaggtacatgggggtgaagaggtttttctcagcaccttcgaccagacaatcagcagccaaggccagactgtcggcggtcttctgggaacccttggggaagagaccgatggactcgccggcaccgacgaagcggtgggcaaggccacggccccaccaggtcatgcgagcgatggtgaagaagtcccaggccgagcccatgtgcttgaaggaacccgccagcgggtagtaccagggaatagggtcgggacgggcagcgagatcctcgtgatgcttcagttcaaagccagcgttcttcatggcttcgagaccctcggagatacggaccatgttggagataccgtcaccctgctcgataccgagacggatgcgacggtgctcaggatcatcgttgttataatcgtcggtcatgagccactcgtacacagcgaaggtaccacctggcttcaggacacggaagatctcgctgtagacaccgacaagctcgggggcgtgaacagtggcttcaatggcgtagacggcatcaaagctgttgtcggggaagttcatctgcatgaagtcgcccttgacgaaggccatcttgtccgaaagaccctgcttttccgcgtagtgggtagcgcggtcgatctggtagtcgttgttgttcagaccggtgacgtgagcaccagtgaacttgaccatctcgcgagcagggccaccgacaccacagccaacatccagaaccttcatgtcctctgtgataccagcctggagggcaaggtagtgctcgtgacgggcaatggcctggtggaaaggctcaccgtaggcgaaacggcagaaatggaacgaagaaccccatccatactcgtagaagtcggtagccaggttgtagtagctgtaagagaatcattagtatgagtcgcgttgatcaatgggggttttccaaacgtactgtctggtcaaggtagcatattcagccttgcgggcctataacacagaaaaagttagcgataaggaccaattgttttggatgcctactgccatacctcacgggtctcgggtgtctcatcagcggcattctggttgtcccaatgcttgaagtactcatcgacggcggccttctgggcggcggcgtcctttccgcgcatagcagcaagaccaccctgggccttggctgactttccatgcagagccttgttgaaggcagcgtcacgcgccttgtcctcacgttccaatacagagggagccatgttgaaggaatgagtcgcaaagattaaaaggggtagagtaaaaggaggcaaaggcgtcaatttccaagaatttcctcgagaaaaagacaaaaagacaaggtaaaccgagattggaaataccacaagagaagcgaagcaagagagcacaattgaagggaatggatagcgacttggagaagtaggagaaaggggaaataaataagagtcgaatcccaagcaactttttgacaatccaaagtggagagccaatcagggggttcttccgaacgactagaccgagccttagtgtcctccggggggcagattggggagtggccacactctctttccctcgcgggacagcaagttccggcctgtggctgagtcggacgctgtacctcccggtgggaaaaagggtgacctgaggcacataatcacgtgatacactagccacattgtggcacacgccacttctatcaatcttgatactagccttggaagctctcacctctctccactgacccatactgtccgatatgcctcctcaaatcaagcatgatttgaatcgatccggctgggagtcgacagactttccctccgtttgtgagaactgccttcccgaaaatccatacgtgcagatgatcaaggaagatcatggcgcagagtgcaagatcgtaagtcttttttttctgctcccccgaggctagttcataaccacatactaaatatttagtgcacgcgaccatttactattttccgttggaaggccgatcggacctcccgccaaaagcgatccattatctgtctcacatgcgcgcgcctgaagaactgctgtcaatgctgcatgctagatttgtctttcggtcttccccttgccgtccgtgatgctgctctcaaaatggtcgccccaggaccggaaagctccatcaatcgcgagtattacgcgcagaacaacgagaaggaaatcgaagagggacgcggcgctattgaagaatacgaaaagacagacgacaaggctcgtgagcttttgcgacgccttgcaaacagcgaaccgtattaccgcaaacccagacgaatcgaagcacctgccgaggaggagaaagcggaggaaggcacggcgacagatcaaccacgaacaaacagtcggtatggaaatggaccaggtccggttcgcaccagtgaaagccgcgccggaaaccgccttccaggccggggaggacgaggtggtggccgtggtggccgcccattccccagtaccacccaattaccgccatcggctgcagatattcttccccctaaggatcccaacgtcacttccttgtttattacaggcgtggaagacgatctccctgaacatgcgcttcgcacattttttagcgaattcggccagctccggtcgcttatttgctcccaccgctcccattgtgctttcatcaactacgtcaaccgtgcggatgccgaaaccgccgccaaccactgccaaggcaaggccatcattcagggctgccctctacgtgttcgctggggaaagccgaagccactggataatttggaccgtgaagagagaatgcaaaatgcccgcgagggtcgccagaccgtggcatcggttgccaagggtaagcaagcagatcgacaagccattacctctgcaggcgagggtgctagccaggagaaagctcagcctcatgttattgcaccaccgcccggatcgggtgagatccaatatgccagcatgaatggcgattgaacagacttgggcggataccattaaattaaattgagggttcggagcgggcgttaccaaggattgttattctatgcaaatctatgtacttcaatcgaaaataccccgaagacgccaacgataaaagagtcgggtatcttataatacatgtccggtcactgtcgtagcttattttactgtttcatatgccgtcaatttgacatatggtcgtagacttggcttcgactctgaatagactcggagagtgcgctcaaattcaactgagcatgatggcaggaagtagaatcctatcatgacgagcaagccttgtggattttcacattctgatcgccgattttgacagagtcgttatcaccgcgttcaatctggtcgtgaatattgagttctgtggatcaatcgctcgttagtaaacagtttgaatgagtacacaagtaccaaaccacgaaatgcaatcgcgagattaagaaacacctaccccacttagcagcttcatctccctgctctctcgagccctggacgatgttgtggcgcaggatatccgcaacctcaatcccgtgcttaatttgcattccagtgtcgacagcggaccgacggttctcctcaaacttcttgcgaacttcctggcgcgcagcgatgaaaattgggggatcgtctatagcggacgtcagtatgaacagatgcctcagtgacggttgtgttggtcaaacgaactatggaaggccacccgggtagaccggagaagttgccgatagacacccttagcagcagcggcagtggaggtggccatagtgaaaggcggaattgtcacagaagtatagacgtgggtgtttttaggaacaggccgggaagcaggtggcaaactgctgtagatgatccgcacgaacaatgagataggataaagttagagggtggtgctgtagatgcgatgtagaagttgtagttgtctaaagaagaacgcagatcgatcagaccagaaaatttgaatgtacaagtgaacagagaaaggaagcaaggccgggtgccatcaccaatctcaaaactctagaacatccggcccgtgattggctggaggggcggatatttggggcagaaaaaaaaggtatgcaaaaaattccatcgcgggacccgacgccctccacacacaacttggtaccgtcaccaataccattacacaatggctgctgctcaagttgttgacattaccctccctaccttgcctcagggctgggctggtgagaaggatttcaagattgtcggtgctctgtccggtgccaccaagcgcaacgtggagcccgttggcccgcacttcctggctcacgctcgccgagtaagttcttcaaattcactcattcttgtttcgtcagaattaaccacattctagtctcgtcacaaccgtactttctccgaggatgagcgcctccaggcccagaacaatgtcaaaaagaccgagactgaggaggatgatgatatctctgaagatgaggatcctgtcatgcttgcccgtgaggccaaggactggaaggtcagtaatgtaacatttattctggctggtcattttctaactcctagcagggccaggatcactacgccgtcttgggtttgaaaaagtaccgctggcgtgcaacccccgagcagatcaagcgggctcaccgcaagaaggtcctgcgtcaccaccctgacaagaaggccgcccagggtaacagcgatgagaacgacagcttcttcaagtgtatccagaaggctaccgatctgcttctcgaccctactcgtcgtcgccagttcgattccgtcgacgacaacgctgacgttgagccccccactaagaagctcaccggtagcaagttctacaaggcctggggccctgttttcgttgcagagggtcgcttctccaataagcagcctgtgcccacactcggagacgagaacagcactcaggagcatgtcgagactttctacaacttctggtacaatgttgacagctggaggactttcgagtaccttgatgaggatgtgcctgatgatggagagagtcgtgaccagaaacgtcatgtggagaagaagaacgccaatgcccgccgcaagcgcaagaccgaggacaccgttcgtctgcgtgagctcgttgacgagtgtctcgcttccgatgagcgtattaagaagttccgccagcaggctcgtgccggcaaagacgctaagcgtctcgccaaggaggaggagatgcgtcgtctcaaggaggagaaggagaaagccaaggccgccgaggagcagcgcaagaaggacgctgaggaggccgccaaggctgaccgtgagaagaataagaaggctaaagaggccgctaagaacgcttccaagaagaacaagcgtatcctcaagggctccgtcaaggatgtcaactacttcgccgccggtgagcccactcccgctgatatcgacaatgtcctcagcgatgtcgacctcatcatggccaagatcgatgttgatgagcttgccgttctggctgagaagctcaccattgccggcagtgatggcgctgctgtcaagaccgcttggtctggcgaggctaagcgccttgttgatgctggcaagctgaaggccggcgaggccaaggtcttcgtttaaatattcttgtctacccgatagatgaggggtagcctatatacttaggctttcctgatgatgattattcacgccacatagagtagaaaaatggatggtgctcttatctaaatgcagtgtctacctatgtatcactcgtagttcttgtcctcaaatccgcatgacagaacacattggcttcgagactacgctccaactaacttccaaggttactacattcagccaactgcatgtctgaccactcccagccacgtgattggtcatggatcggatagtgcgctttttcatcatttgtttctagggtcatgttctgattgcggggtcacaagcagatagacacgatggatgtctctggcgaaggtcggtttgtttaaaagtgatcccatatgattacaccacgttgactagtgaaggcacttagagcgaccagaactcagtctccggaagatcattcgagttgcccaagacagattacttaaatatggaccctcccaagatatagagcttgaagccgagaatatgcgctatatctccgaaaacacggccatcccgatcccccacgttcacgagacccaaatccatgatggtggcgctaagtctatattaatggactatatcgaaggtcagacgctgcaagatgcctggtccagcatgatcccatcacaaaagatgtccgttgcgcaggaactacgtggatatgtacagcaactccgggggctaaagcgcgaacccctggaacctttcagccataaacatatatacatgcggcgcccagtctaccttgacgagtatctattttcaagattgaggacctctgtcccggatctcctgctcaattgtacgggaaataaatggccggaggataagttggtcttcacgcacggtgatctggcaccgagaaatatcctggttgacgaccatggtcatgtcactgcagttttggactgggaactttcaggatggcaacctgaatggtgtgagactgttagagcgtatactttttgcaacgatattcctggctggaccgcctatctatccgctgttttcccaccgggtgatgcaacggagtatatggctgtggcgtttgctagacatatgaaatgatgagaactggatgcgatatacggatttattcatacatatgaatttattttgctatgaatgcacgcctggcattccatacctcggactgaaaacaagccatattctgggaaaaaagatgcgaataatggctaagaacaggccctaaaatggatacgagactgaattcactagagtatgactgtaatattcctctgtgataaagaagattcgcagggataagttggaattactatgaaaatcgtcgattgtggtgatactacttcggcctgtatgtagtacatcgagaatgagtctagtgatcaaacccttagccccctaggacacatgtcactcctagcttctaatatgttccgagatagtgtactcccaaccccgcgcaaagcatatgttgaccgcggctcaatttcgttgagctccatgattagtgatccaatctgcatgcccaagtgaaagccgaggcggactgacatataatttgcgaacataagtagattccagtctggtttatctttagtgaccacaatgatttttgacccagacactatcgaaattcccaagtcttacgagattcttccattgacggatgtcaatgtctcccaccacccagccggggccctcgaagctacccctgtcattgtggtgacgctaaaccgaccagaaaagaataatctattcactctagagatgatgcatgtgtttgagaagatattttatatgtttgatgttgacgaacgcgtcaaagttgtagtgcttaccggtgctggcaaaatgttctgtgctggtgcggatcttgagcgagggtttagtgaaatgaagaaggagaggaacaaggatcatcgcgataggtaaaccatgaagctccaaccatagctcatatatcaattccgctaataccgatatcaacagcggcggccgattcgctttatccatctaccgctgtcgcaagcctactatagcggccatgcagggctccgctgttgggttgggcatgacgatgtccctgccggctgccatacgcattggctgcgagaaatccaagtatggatttgtcttcccgcgacgaggtctaacgatggaatcaagttcttcattctttctcccgcggttgattggttactccaatgctctttatttaatcacaacgggcggcaccttcccgcctacgtcgccgcattttgggaccttgttccaggagacataccctgatccaaatcaggtagttgcgcgtgcgttggagcttgctacagaagttgcagagaacattagccccatggcatcatatctttcgcaggaactcatgtggcgtagcccagggagtgccgaggagactcacctagttgattcagcggtgttgtatcatatgtttagtgggaggtatgctctctccgtctcgtttcatttagccttcttgggaatatttgcattataagaagcaataataaccgtgttatagggactcaaaggaaggcatcaaagcattcttcgagaaacgaaaaccagttttcaatgcaactcttgaggttgatgcaccgcccagctttccttggtggtccaatgttgatatcgggagacgtccgaaggcaagtaagatgagtaaggcaaaattgtaggcaagtgccactgccttcaaccagcccagaatgtgcacatttagaacgggggacgagaaatgtgattctgtggcacaaatgtgttctgagaaagcaaccttgtaagcgggtccgggatgtggcggagcatccctgagataaagttgaaacggaatctgacagccgctcattacggtctccataatttccaagtttccagctccatccagctgtaggtatctagctccactttcttgtaactcaaccttatctcatactttgagctctacaaaagttgactagtttgtagatgttgatcgctcaagaccacatgagacgaatgttgctatcactacagtatcggcacgagcgcttggtgtataaatagtataaataggcaatctaatttgatgttgaagtatctagatgatgaattgctaattatttacgaactctgccatggccttctttcggtcacttgagatgcggatgcggtcctaaacacagaagtcgacgatggcattggatgtagggacaccggttcctgcagattgccatttcgctgctcggagcgctctttaatccaaggccggaggttgaaaataccgccgcagatgaatatgcccacccaaagggtcaattcagttccataaataattatcccaagagcagaaatagtcgatccaaacactgcttgcatattagccgctgaccatctctacctaacgatgaagttgacctacagacagagaggagcgaaaacaagtccccagcagcgtcaataccgacaaaaatgaagctgattcctcggacagtccggtggacatagatatcccagtaatgtctcagtacacctgctgcaagtaggcacgcactcaaaactgccatcaagatgagaggccattctaatccgcgccttttcgcagcttgcaaggcaaatatgagtcctgcttcaatgccaccgaacagcagcagaagcgaagtgactgcgacacagcatttcatgattcggtatttctgagtttatatgagtattatgaggataatgttgaatataaagcaaagtgtttacctttccatagtagagacactgcgcccaagtaatcaggctgagtgtcattaggatttgaggctgaatcctcagggcaatgttgaattcttccacaatgttgtacaccccgaggggaacccctgcggtggcccataagagcatcattgacccttgtaggccttcagtgtcatgtctcctgtaattgatgactatttgaggaatgagctgtataatgtgatcagtgcgggctcaaaagtaattggcacacagcaaccgcatacttggacagaccagcatacctaaagaatagttagtccgctctaccaatcgggaaaatcgggaaatagaacccactgcacccagggtaccgagaacattctctgcaactcgattgtccatttataagaggcttcgtcgctagagcggcggacacacagactgagaacgagatctgataacggggctcctaagtttgcagggtttgcactattatgcctgaggcaacaacttggcgatgacgcacttctcccgaagtcggcagccgcagcgcttgctaactaggcgtgcatcagcgaaccctggacgatccttacctatagatgtcacacgtgaaggtgggctatttcttgaactgtctatgaaagtggatcaaagtggttcgagtgatcattgactgacaatatactatcgtgtttcctttgtcaatattaatacagacaggttatgtagctagtgttctgtgaatatgacccatctcatatctcatagccaaattctgtaatgttccggagtattttagcgacatgtgtgatcgagaaaaggtacacgcgataactcagggtaaaaaagcacgctccatttaagaaccccctatctacggagtactccgtactccgaacttgatttgataaaagggctgtgcgtgactagaccctgaaagcattcaaagtccagggatcgatggcgatcggaattcaagtccggtcactaatagggaagagtcaaccaaaagatgggttagagaatttacctttgaagtaaataactgtacaactatgttggccagggtggaagcatttggctacaagttacctagtagtttagatgtatgacaaccttgaaagaaaccctaagatgagatcaaacaacgtagaaccatggacatgaagatatcaagattccagggtttctctgccgatcggataagaaatttcttttcttcccaagtgatttaccttgttttttttttccctgtcggctgggaggaccgcatggttgccacctgtgccacctttttttggaaatccagccaccatatttatatcaaggtgtagtcgatataaatagaacgagtctcacgaacatagggagtacattataggaactggtggtgatttagggacgagtacgtatgcatctgcgtaagagggggtcccagcccctcccacttacctgaataggactaaatgatcatcgactggggatgatatcatcaggaatgaaaacccgttgtcggggaggttccacattagtacggagcacggggacggaggatgaattcctgataggagatctatattatatgcatgcatggctgggttcgaccggagtcaagaagtatacatgtggatgcccggacgtaattgatgcttggcaccttgaaacatattctttttctacttcgtacttgcggagtataggtaataaaggaaattcctaatcttaaattcggtgggtccatcataaattgtggactttcccctgtcagtctaaaaagacccttaagaaaccagccctcctttctccttgcgctttttcaatcgtctaccaaacacgccttctacagtcgtcttcaaggcaccatggtctctactcttcgcctctgcctcttggccgtgactctacttttcaacttctcctccgcattccccctcatcagccgcgacgtccaatggtccttcacccttttcccgtcagcctcatgcaacggaactgtcggtgatcctcacgtcggatctggcagcacaggctgtcgcgccgatctctacagcgttgcctctgcctacattctgaactctctcgccgagggctgccgcatcgagttgttcgataacaccatgtgtgaccagaacgaactctccgacatcgccagccaagccaatgccacccaaacttgccgcatagctggaacgagacgccactacggttcatatcaggtcacctgcgcctgaacatcttcaaacctcttttcgaatgtcgctgtttgaaacagtgaagggtctctggcgggctcctagatcctatgcgcaatttttttgaaagtctgaaagatcgattgggatccctcggtgggaaagtataatatgtatagactttttaatgatacccttagattaaatgaaatgagtttacgatcgtcgatataagttgcactcttttcctgctatttactcgtcgatgtccacaactgccggtctgcgtgttctgttatctgtcgtgtcgggcggcttctgtcaataatgcaccatggagattataaaaatagagaatttgagctgtccgagatctgctcactgtctcactcccttcatagcagcgaacatcatacgtcggcctgcaagccaggatcagcttgatgaaatatgaggacgcgcaatggcgggtaacctgatacactagggatcattttccttgcaccgtttaaccatgaaacattaaaccactattcattggaaacactgttctcaaaacacgtcatataacggtcttgacttccaactccatggttgatagattgacggatatatattctcctacgccaataccgcatttacggatatacatattcctgcgccacttttctcgagcgtggcgaggtttataccccggaagacaaacgtgcagactcgtatgcgtggctctcattcgctagaaattatcagatcttctcggtcttcttcggagttaaggcatgggctttccagaaatggataaactccgagggatatacgccgcaagcggatggacatttttggacctttattaaggactattcgcgcttctttttttcatagtcgcatattccctacaatctgtttgattatgacagtagtaaaaactgagttggaaagcgacaccagcccacctgcggctgtatcattctttgatccatctctcaatgagattcgaaagcgggtattctaccaatgggctcgcacttgtaagtaaagtctagaatacggcaactcacggaatgcaagagaaattaacggaaaacaacagtattgattctgtgcgtcttcgtgtatgccgtgctatctctcttctggggagtccagtacggcactgaggacaagttcccagtgctgaaggtatgggttgtcgatttcgacggccaagttgatccataccgctccaatgataccatcgttggtccagcagttacggatgctgccaagagaatcctgcagtctgacagcctccacctcggctacactatcaaatcccccgccgacttcaactatgaccccttggccgtacgccagggcatctatgacgaacatgcctatgccgccgtgatcatcaagcctaacgcaacaacgttgctccgggatgcagtcaccaatgacaatacaacctacgatccgactggcgccatcgagacagtaatcatctccgcgcgcgatgaaacaacctactacacctatatcatgcccgacctagtcatcctacagggcatggtgctagcagagttcggccctcaatgggtccaatctctcacttcatctgtcagcaacctgtcatctgtgcccccgcaggtgatcaacccggccattgggttcacgtccatcgatctacgtccttttgccccggctgtcgctacgcctgccgtcaccgtcggtttgatctatctgatcatcattgccttctttaacttcccctttatgatacctattcatgctcagttcatgaaaccagatggccatccaccgttgaaggtgccacattggctcctttggcgccttttctcgagcctggtggcttacttctttctttcgctgtgctactcactggtgtctctgactttcaagatcccattcagcaatgactctgcgcctgatgttctatccgcgaacaatcccaatggctatggacgtggctcatttgttgtgttttggatgctgaactgggttggcatggctgccttggggctcccctgtgagaacatggccatgatcctcggcttcccatggagtgctttgttccttatcttttgggttattacgaatgttgcgactgggttctatgccattgatttggctccgaggttctatagatgggggtatgcatggccgttacatcgaagtaagtttccccctcatcgtgatcgatgctctgttgctaatgatcatctagttgtcgaggctctacgaaccatccttttcgatgttcattcgcgcattggattggactttgctattttgttcatttggattgcagtatccttggtcttttatcctgtcgcgaccttcatcatgcggtggaagatgctgcgagggatataaaatagggctaaaatatgaagttagcaggcagtaaatagacagtgaataggttgggacagtctacggtagccactggccgctagtgcgctcaggttgtgcctgcagtacatatagtatagtttgtaatatcaggtatcttataagattcaatacttccacctaattacatgtattatgaagttatgactaccgagaaatgcgaaagtgatatcttcaaagacagcgatctagccgcagagggagcttcttggctcaatcattgaagcctgctgagtcgattgaggtctcaactacaagtttcgttgaagaaaggtcttgttttattcataaattcagtaatcctcgccttgtatatcaatagccaatggctacctgttcgctgtagcttcctctctggttttagcttaatgtatgtaaattccaggtctgtctggctattacgatatgttgttaattttccatatcactccttaatttcagttaggtcacgatccatttcaatcaatcaatgttgtttgcttccctgacgttgccacgacaaacacacccatcccaccttggcagtcctcgcaaaccttccaacctctactcattgcttacttctacctattgataattcagcatggcgcgtatggtcacaaccccgttccctggagaccattctacgaccacaaagccaaaagacgccgttgaccagaaacgggccgcgagcccaagtactagccaggacgtgctcaaccctaccatatctccaggacaatcgactgatgtagcaatcgaagaattcgaaattacctctgcactgaagctcatagccgtctcagtggctcagcagcgcttcctcgccgctaaatccctcgtccttcacccgaccaccctaaccctggtagccgcgagtttcgcatacagtgtcggtgtcatttatcatcacccatcttgctggccctacattgttgttttctgcaccaccgcggtattggccactctaggtatcgtcacacgcttgcttgagggatacaacgatgaggctgagaaggttggaacactgaactggctgtacgggcacgatcctagcagcgataacactactcaggaagatcctgccttcaactcggatagtgggatcacctttgtacttgtttatcgattcgggcgctacattgtcggcgcgcttgtcatgagcatcacctacaacggcatccaaccccatccgaaagccaacgcaataactctcccaataggagaaaactacgatgcctgtgtacgtgcctggacagtccaaaaaggcttccggggatacgggattggcactgcgctcctcaacgaagctattaggatctgctataagcatgagtggaaaggactccggttcgcgacttcccacgccaactcccttcgcgtctttcactccctctttcatagtgacatggaccaggcgtccgctatatggagctcgtatctgcgcaagcgggtcgaggcttatcgccaatcctgtgctgtttctgagactagagttcttgatgcgtctctacatgcgagtgagagccagagcacgctgagtgatacacggatgcggtttatttgtaccgaggcggagaagctcaaccggatgtacttccatgtacgccttggacaggtagttgatgctcaaactcggtggaagaaaatcttgtaatcggtcacgcttcattgttggcttgctgtttctggatgtggtgtcggtggagttcaggagtattgatgttaaggttccccttctgcaatttttatctatctatatggatgattgttgcaccaggaactctcatagtcttatgaagaatcttggaagggttgttaccacgtctggctgctttgactacagtggtagtgttttgtattggtttcattgtccaagcctgtaggaagaattaggtttcatcttcggagccaatttgtggcggtgactaactagtcctagtgtttgtagtactaattactagctaactagttactcaagcagtttctcaagtggttgcttgagtagttactaaagtaattgacgataaagcagttaataatgatatgacaaaaggcatttaattttattagtggtttacatacaaattgtaggtacctactgccatactatcatatggcaggaaataagcctaattgtgaacgcggtactgaaattacaggcagggggagaataagccagtaagaggggggctttgtgtagcattaaaagttggaatcagtcgtttcgctctgcaacgactatctggaggccttaggctgtcgagatcactagtatattttccttcacgctaaattagcggtcccatttcgacattcgctcagctgacggccgccaaggacttgctcgagtacttgggagcataggcgcttgaggcatacagcaagttatttgcctcagccaccgagaggaagcaaaccctgcaaacctctcgggagcacagcggggaggaaaaagagctcgtgacggcgtattgaggagctaaacctcataagtcaagaataaccagaaaaggtaattcacagatgcgccgtttacagctacaatatgagcaccagggggattgaggccagaaatggctgcctttccacccgtaattttggacgtccagccgccccatgaccgccataacgtgtaacaccactattctgtacctacccagcacttttagtcaccctccggtcctgatgttgaagtatgctggctatttgagcctggaaatgtaaagaatgtaatgcagaatatctgatatcgtccggttcacgaagtaagctagggaggcaagatttcatggcaaaggagtgagtccaacgagattgagacccgctttggttatgatctctcggagggacgcaatgtcaaattcaagccgatcactgccctgggagcttgaggcaattgcgccgttaaaaatgtcgtctttggtgagataaatgggcagttcaaacgccccatgaaccgggaaaattcggttgctcgcaatcatgcatgcactgcctgtagaatttcgcccccagagttcgattgttccagcaacaccttgtctgcgctggaaaaatttcacaagaagaaccttacacacacccactccttccatcaaagtttcgcatcatcaacgaggcttcgatatgtctgattgaagccaacctcaataattatccttggttcatgcaagtaaggaagtctgaagcaagagatgaaggtatcgggttctttttgatcaccggtgtatggagggttgctagcagtaactcgcgggcttgctgtcaccataacattgagatgttcatcaggcataagttgaccgttgatattccaacgggtcagctgttggacaaaccacgcatgcggggctgaatcggtataatttggcattttcagtgttataactttcctctgggagaataatccttttcgaacacgggggaactttgcgtcgagaagttttaagatcaattgaaatttcatgatccaccgaggtaaggacaacaaacgagtagagagactggtcgaagaatccactgccttggattatcgccaatgcctcgtcggcagatttgattttgtcaagggagatttctttgtcaagggcgtagtcttcactgccagatgactgttcggaaatctcgctattggctggcgtggaatcgattggtgaagacatgatgtgcaaaagaaaggagggtgcttgaagatggaaagtgcaagtatggaagtcgcgaagtgaagtacaattgggacacgtgatcaagggaagcactgagattctattgggtagtcgcacggagatgtactctgtagtgtacagtaatataacccttgatctcttccctccttgcttgtatgcaaatttacgtatgcatagtacttatcacatgcacttgatcgcatatattctgtaaaacaacaaaaatacataagagagggctgaaatcaaaggtttcagcccgatactaagtatagaaatcgggccaagtcacattccaagggaaggcgctcaatgtctcagatagattgacccatcttacctctttgttttgcatttgctttctcgtcagactattcaaaccctctttcgaattcaccaaatttcacggttcaaaatgtctacgacttcctccactacctcgtccgtgagcacaaccagtactgcctgcggtggcagcgtctggcaaatcccaacaacagactcagcttgtgcggccgtcatcagcggaaatatgaccgatgtgatggatgaatgctgcaaggacgcgaaggtctccaagtacgacaacgactgcggcatctactgcctcgcgcaaggccaaaatgtcgacaagcttcagtcttgcctcactagcaagagtggcaactatcacgatgtcttttgcaacgccgctctcaatgcgaccgctacagccacagcgacgggctcaaagtccacttcctcaggcaccggtagtagcacgcactcgtctgctgcctcgacttccacaaatgccgctatttccaaccagcctatctccaagtccggtgttggaatgattgcgctccttttcggctctgctttgatggctgttatttcttaacttggcggatgatttgatgtttcgtttggggattcaatgcctgtcccgataaaatacaatgtttctttttctagcgaacaagcgaccgtgttttcttactcgcatctaatacgaagtatgatttgagatgcataatggaatttgcgcactgcaacgatcaggatatattgagaaacctcatgacgtcatcgggttgcactgaatcagcatctgtttatcctgcccctccactgaagatcagaatatcactactccgtagatacaactgtgttcgaaaatgtcatcaatcgcaaagactgtcatcgcgacaggcacctcgtccggcttggtaagaattatatgcccttggaatattcaggaatattcaggatcctaacatcggtcatagggatttgaaacaatcaagcagttactccagcagacacagccgtacagcttcattctaggcgttcgtgacacagaaaagacacgagtcgcgtacgatgatctgaaattcgacacttcaaagcacagcgtctctatcttgcccctggatcttctgaatcttaagagtgtgcagagctttgccaaacaagcactctctgaattgggcaaaaggccgttgaactatcttttccttattgcggggttccttgccagcgctgaagggccggggcctcatggctcacaatggtgcgaatcatacgtggtaaaccatctaggtatgtcaaaacgactcatcggctactaaaggagtctaggaggctagagctaatcattcatctatcgcaacccagcccagcattacctgacacacgaatttgctgagaccctgtctgcctcgcgatcacgtatcgtcattgtgtcttcgggtgcaattcgtaatgtgagaggaggcgatccaggtgagtttagttccattctcccagttgtgtcgctgtccgaagcaaagttgttcacaaggctgacttcatattagccactcttgaggttgacctaaaagcaaactccggtgcaaacgccagagtagtgtatagtgcatcgaaattcactcagcttctgggtgcacactactggcgtcgtagcctcccaaattgcacagtcgtggctgtctcgccaggtctcatccctaacaccaagcttgcccagcattcgagcttaggattgtccatggatatgcccgatgccaagaccgtgccagagggtaaggatctttgcatttggatttttgatttgaagacgatatctaacaattaataggtgcccagaatatcctccgcgcggtcacggtcgagaatcttcccgctgacccggaacagattttcttgactagctggggtgaatggtggcccaaggatgtctatgcgttgagtcttgatcctgcgctgcaagacaagtggtgtttgagcaaggaggatatcgagaagtccgagcctgtgttcaaggaataaggagcatagtatgcacattttacttcaacgggtctgcaaatagtatatctcacatggagtctgttttgcaaagatactgttccaagagcaatgctattcactcactggctcgcgaatcggagaaaatacgtagacatgaatgagtcgaatttatccctcgtgtagcagaaaagtcttaaagtgggaagtttccttgcgtacatctcaagccaaggcaagtaataaacaacagaaagtactacaaaaaggacatacatattgcacaagcgccgacaaatcgagccagccacaagatcattatatttgcaaatatagaacagcatctatgtgtatatagtatgcgtaccggaatttcccgaccggtcgaaatcaatcataatctaaaatccagtacattacatcaacaagaaaactcgaacctactcagcgttcgcaagcttgcgcatggtagcaaagttgggcgacccgagaccagaaacagggtcccaacccttagtagcgttccagctagcacctgggatcgacggaccaccgttattggcaccaccgaagcggctcttgccatcgcaacccgtgctgccgccatcgacaatgtcctttaggccggcgcgccctgtcgagtacagccaaggattaaggaagcccattggtggtttgttgactttgaggcgagcgtcgttgaggagggcgacgactccggcgaaggcaggtgccgagcaggaggtgccgtcgacgctggtcaacgagcccttatcgtatatagcgtaattgcgaccttgggctgtgacatcggggaaggcacgacccttagggttgaagaggccagaccagcggttacccaggatctcgaggtactcactcacggcctcctcttgccatttcgggcgagcccagagatcggaaaagccgccggacgagaagtacacggcctgttcgggcgcggtatgggttgtcgcgccgactgatgtcacccacgggcaggcggcggggaactggggtgggaagcgggtcgcgttcctgccgtcgttcgtcaggcacgcggacccaacgccggagtcgccagatgagaaaatgacggatacaccacggctaccgagctgcgagtacaagttgcaaacactgcgggcgtacttctcgggaatgctctacaggttgatattagagaccgacaaaatcacgaacaaagggggggtgggtgtcatacctgctcgtcctcaccataggaggtagaaatcacctggggaaggtcctttttgtccagcttgagcacgttctggaggaattcaaggtatggctcgttgttgttatcattgggatcaggctggtcgagatcgggaacaagttcaccacggccgccaacgctaaattcggtgacgggaacaggagagctgactccaacaatgtactgcaagtccaggttcgcctcgctgctgctaccgctggaactttgatcattaagaccgccgttgtacctggtgacggagaagttctggcccttggcagagggcgcgatatttttctcaaatagtgccagatcggagtatcgtgcatactcctctaggtagctggcaaacccgaccttgttcccattggtatcattggcctggtaatcaccgatattatatatatccttgagacactgaggagtgatgatactgttgcaatccggctgagcggacacggcgtttgagcggaaagcctcgtcggattccttgacctggccgtgtaatatgccccgatgggcgcgcagctggccgaaacgggtggttggctggatcatgttgatgtgtggcaccagagccttcgggactgagtacttgagtgtgcgaagacgctcaatgtgcctgacattactgacgtagaactggaaattggctgccagcagctcatttgccgtctccacggtggtgtagaaggtcatccaatctgcatcctgttcgatcctggtaatacccgcgccttcgagccagtcacggattgactccgcggactccgcactgggctgtagcatccgcttcatttcttcgtgggtggtgaagtggtgcccgtagctagggtgatcgggggttgacatctccatcacagcctcttcgaagccggcagtatccccctgtgtcagagcgatctgtaacttcaagggctgatcagcacgcggcctgcgagaatatctccatcctaaggtgggtcagtgaatcaattccgtcggtttcgtttcgaacgcaagttgctcaccttgaggaacagcagacaaactctcaaatacatcggctgcagcagaggacgcgagaagcgacaagaccgcgagcgacaatgctccacgactaaatagggatgcaatcatgataaaaaaacgagcgatatgaggacaccctatcagtctaggcctctgcgcagcgaatacagggagtataaatagtctaacagaagactatcaaatacaaaagaggggtaaagaccgtaaattggtgtttattatggttgcattggcggggggaatgatggggcgacaaagaatgtgtgttgaagaagtccaggataaaccaggacaagacaataatattgacaatggagttctttgatcgaagtttcacgtcattcgcttggcacaacagtggaccctttgtggatgcccgcctggtgagactattctaaatcaataatcgctagtagcggtggctgggattgcatcttccggatctggctccatactcgcatcgtcgcgatatcctttcccaaccggagagcgaatgttactgatggaatcggtatagaagcaagccctctatcccattgtgatattgggcctccgtcgggggcgcgtttatgatcggcaggggttgacccactgtgtttgaaggaagcaatgcgaggggcgtcagggggcttgtattgccgggtggctggatgacttggccctaaaacgagatcagctctgattctaatttacatgaagcccacagttcatctgcgatcagatctgatcgatgggaatccgctagaggatatgttcatgatcaaaatcattcttctcctgccaaatttgggtcgtcatgcaccgttgcaccaggcaattaggctatctcatcaaatttgaagataagcttggagggataggtgctaggtttctgtggcgttgtgatgtgctgtcgcaacccgaatgaccatcggttttatttgcattgctgtgcgtcggggtgcgtcgggagtgcgtcggaggctggggtcacaaaattccaatttgctagtgccataatttaggcactggagacagatgtggctggtgatctctagttatctcccttcattattcgacgtgacatctcagtctcgggtaaaaatggctgggcaagaatgcgaggtgagatgagtacagagtacttgcgacgcttgctttcgtgacacctatcaagggacgagatgatagttcccgttggccccggactgttagcgattctatgtgttgtccgagttatattaaaatgttgacttcgtcgcagacaaggttctctggggttgcaacagtctccatcgtccgtcggtactccgtaccccgtgactttccgccaagttatgtgttttttttctttcggttctctttttttaaagagatgatgatactacatacggagtatatattaaagccattgacttcgattatctctagattttcattataggaaaacgcgacaacctggttacaagtatacaaatccaaccggattatggtgatgcatatgtataaatatgtacatgcctgtcggtccaaaaaaaagtatagcttctatacacaaaagatgaaagcccatggtattatttataatcaacgatgactggagcttgaacaacaggaacagagccatcaacacccacctcattcaattccagatggtgggcgtagaccatcgaggcgatggcatcttcagtctgaagatatgttcggttgcctcggatgaaccagaatgcaacagcgatgaccagcataacgccaaacacggcaatggcaaagttcatatcactgggcgccgggttggggctgccagggaacaggaagaaaatggtagtgatgatacagtagaagatgctgacccaattcaaccacggcccaatgcgaccgagcttgaatggacccgggggcaatttatcacggccgacgacgagcaaggcaagaatcggcatggcgtaggagacagtcagggcaatagtgctgacactgagaatcgcctcgagcacagtgttggcgaataggtataggatgccgacaataccgatgacaatgctctgaccccagagagcgcgagcagggacttgccatacagggtcgacgtggctgaagtagttgctgaaaggcacaccgccgtcgcgggaaaagccccaggtcaaacgggaggcagtggtcaggatactgatgccctggcctagaccattgaagatgaacagtgcaaggagtacagcggctcctttcaatccaacagtctcgacaataagctccatgaaggggaggtcggcgttaacgacattgtctacattctggatgcagaacagacagaccaccatgaagatgaatccagtcacggcaccgaacaaaacggccatccagatgactcgaggagcattcttccgaggcgcagggatttcctccaccatgtgaataaccgaatcgaacgcggtcaacccgtacgcggcctgtaccaagccggtgaaccaaaccacaccgtcgccccagccagtctcattcttccaagcaccgaacacgaaagaagccggctggaatgacagattactcttggttccgaccgagataagtagcacaagagagagaacgatgaacaggccgaagaaccagactccaacaaagttgttaagccagggtaggatcttctccttacggcagctgacgacgttgatcagggtcagcacaaagaccaccgcgatgtacacaacaaaattgagccagcccttgttggctccatcccactcggggtcaaacatagttttcatgcccagcaggaactcagtcatgaaggcaacctgcgacgcagtcaaggtccaccatccaaatacattgatccatgcgcacatgtatgaattgaatcgacccaatggtgtatcccacagtcgatatacccagtaggcctgaccgagggcggtcggcatgctgctagtcaactcgcccagcgagagcgcaacacagaggttgcatgctgtgactagcagcagaccccagaggatagtaatagcaccaccattggtcagaccgctgctgagatcttgggcgaaggtcgaataggttccttggacatgttagcacacattcgggctccatcgggtgggggaaaaaaccgaaaacataccaagtacacagaaggccagcgccagcatactccacatatcgaacttccgcgtcagggcctgggaatgacccagatcagcgagatcctgtgcatcttgcgcatgctgatccgtcagcggtggcttaaggggttgcgaattgtattccaaatccatgccgtggtatttcagccggaggtaatatatgtcaactcagtgggcaaataagagggaaatgcgcccattttctgattgaagatcaatgagaagcacagaggggggaagcatgatttctatatatctggcgtccggcgtatttggttcgccttgacacctcgcggattctgagataaagctggagaccaattgcgagtagccaatgacgcggcggggctgatactaggttttggttgaatcagaacgattggtcatggacttgggagatgttgataatagaaacgatctagttaactaaaatttctggtttttgcggggagtcgccttcgggaggacctcctccagtgggccgtcatccataatgtccacagaaatgcactccacagataagaactggggtataattggaattgaatggtggaattgacgttggtcaagtaattgaatatcatatccaatccatggatgtaggtatttcgcagcttgttcacaaattccatccgccacacgtttcatagctccgaggtccgaccgttgtacctgaacagcttctcttcaatatccattgaagcctaacaaaagtgcgaattccagcaagaaccgcatgatctcaacaactatcttcccaatataaaaatcaatagcattgtaggttaacatcaaaatacagtcagtggcaacggctgacccaaaacggcaagtccatgcgtggccgataagaattaacgattagcggtgcggctccagtacggtttgggtgtcaattcattaaacatgctttggtgtgtaaatagacatcataatagaaacggtagagctgcatatctgcgtttcatatgagacattaagctgcatatatgtggagtcaataccacatgctccgtatgcgccatagccatggcttgaccggcggaagccatcgtgatatcaagatgtatatggggcaacagcttgaaacatctgtcaacaatcagccgagggtcaggtggcaggctcgaggatggctcgtgacaagattctcatcgaaagcgggaaattggacacgatggagtcggaatgcactttgctttgcaccactgaagcagcagctttgagctttgtccggggaaaactgccatcagggtccacttcttcaattgttgtttcgtaatgagaatcaacagccgtcgctaagattgaggaggtctcctcagttgggcatcgccgtagggtcctctcgatccgtctgaccccaaatctaaatcttgcccagctcaaccccacaaaaggaaggaaacggaagatgcaaacaccgagacacggcgacgtagaccaatgaaggacagaccgtagacgcacggtttggaaacagccccgtgaaccccagaatggttcaatttgattatcgccatggtggactcctacccgtgacagaccgacaagctcactatcgattgcatattctcaaactcagttcacgagaagtgtaaagtcgtctgatggcatccgtgcagatgtgtggttgctgcgatattaaggcacggcgcagcctagtcccaacggggagtatgacctattcaccctgatagggccacggggtttgatgagtggcttcaggaatcattccagtctctgctgcctgctataattagcatagtcagccctctgctgtccccttttcatactccttgctcggaattataggcaatctccggtgctatatttcgcttatgctatccgctccccctgatcaaaggccgcgtgccgagtacgtctctcgaggcgatactgtttaacctgctttgtagactcatcatttccgtcgactctaaacccgagggttgaataggctgggttctattcaatgcgtggtatttgccaggtcgaggcaatgttgaaagcgatatgaaagccggatccaggtcacgatacaaaacgccagcataaagtttggcagaattcaccttgctaaccaagagtggccagtcagtccagcacaggcgtcaaagatcacaagacgaaggaacattacttacactgcaggtatatatacgtggatgggaccacccaaggacaactatttccatatcgggaagcatcaggccatacccgcacacaatcaggaaaaagagaaaatttgagcaaaatgaatcatccgagtcttggcaattatattaatgctttaggacactatccatgaggtattccgtccctgtaggggaatcacaagtcacaaaacacttttgtggtcgccaggacacgaaaatcaaatcatgtctgagaagagaagagggccacatgagcccaaataataacactggatccggaactccaaaagaaataaaggaaaaatcaaggaaagaatatgaacgccgaccgggaccacgttgaccggctactctaagaatacaacgctcgtcgcggtcatgagaacaacaaagggaacaacaaagatacttgaagaagcagcagcatcactgtggttggatcggtatgcacctgatcaaagtcgggggtttttggtctgacgccagattcctcccgccggtagcaggttttgcttgagcattgcgagctccttgtgcaaggcctggttctcctgctgaatgctatcgatgtaggtgagggcattgctgaggatctcggacttcttgagagatcccgcgccaaccttggtatgtttttgaacccccgagggcgagatggcctgctcgagagaaacaaatttggcgttcatgttggtacggtagcgcttctcaatgatgttgtgggcggcacgcttggctgcattccgcatttgagggtcttggccgccggttgaggagtggttggagtctcgggagaagctacgggtcttgcgggatgtggatgtggtgggtttggagggtagaggagtagcaatctcttcttgcttcatctctggactggatgaccagcttgctgaagatgagcgagtcttgctctgtgtttgaggttgagacgaggtgtagtttgaagtcaactcggtctcgaaggcgtttgagtcaatggattgacgggcagcagagggccatgtttgatcgtcgctttcgaactcctgtagaaagattagcttctgtgacaaaatattgataggaagggtggacaatcgtacagatgagagagaagctgcgtcctcgggcatggagaagccactgattccggagctggcaaaggggtcgttgaagagatccttggactcgatgttggtgaggctgtcggcgaagtcgaacgagacgggctccatgtcggaggggttgatagagaacaggtcaatcgcgttgtcgtagctccagttggcagcgagagggtcaggtctttcgaagaagtcggctggtcgagactgaggactcaggtgttggctgaggtaggtcccctggtctatgcagagattggggatctcattggatcggttgcaagccatgatacacatcttggatcatacgttggcctcgaaggcaagtttggcagtagggtgatatagtaaggtgaaagagttgctatgagcaaagggtggcgaaagaatcgagtatttataaataaatcggaactgaagatatcatggaacaggatatgggtttcggccgcggggcatttatataaacccagagtaagccccgaaaaaaaacaggggtacgaaggtgatccggaacagattacgcctgtgtacgaagccgagattgacctgtgatgtcaggtttggaccagacgtatcgaaaatggcttagcctccggctggtcactcgcttgcagggttgtcgaagccgagttcacccctaagatctcaaacggccggctccgacgaggatattttccgatgggctgtaacgtgtgaaacggttgaagttaaaaaccgtgtgggctaggccttggcccaagactccgccggccgagtctcggacccgatattatgtatttttgtgtattttgtgtattttgtgtaatttatgtcttttttaatgtattctgtacctcctttcttgttttcacgggctttgtgttttttattttgctcttgctgctttgaacgggtggtataattgagacctggctgcccagcaggctatctacagcaacttggaagccaatgatgccgagtctgaacacttgccagtggttcattagaatgaggagatttccaactatgcctgatattagaagatctataactatgccgttaaaaaatcattctttcatcatagacaatgatactatacttccaagtagtcgactactccgtacctattgaccaattatatcgcacaaccaagatctacccgtactgcgttatacggacaacgcagccctaaattgatcctcaaccgtcttagtaaaagcggcattgtcagaacctatcagtatagtcatcctcggctttgcatcttacattccttacccctacggtaaaagttatatcctgtttcctcatctcgcgtgctgattgcttgcctcaccattatactttttgatagtcacctgtcgtcgactccatcgagccattaattttccgaaagacggattgatatgcagctaacccatgccatgctgcacaaagtctagaagagacgagagatcatatccgaaatagattgatacatctactaatgcaatatacgaatacgtacccgctcaatagtttgatgttcagagtttcttggaaaggtcacgtatattcccgggcagtgctgtcggtttccgcccgcttgtggcaatgtccacgaggcgtactccgtggtatcagttgaatacggtactttatgccgcaggtatttttcacttctgctccgtacatataaaactgatatgtcacagtcagatgcattaaacaacgatgcctattggataaaaaagcgagttggattccgtcgagtacctccgtagtgcctcgatcgcagtgtcgaccagtcgcgaagcagctaaaccccgcttattcacttttttccttcccaaatcggtcccacctgcccttcggagtggggtgactcggaagttctcattcccttgcccttcttcgccttaccctcccgatgtcgaccgagacgatacgagaagctcctgtctctctccatatttttgacctccggtcaacgtttccgcatggcatgagggttcgtctcctgatactcgggtgaatccttttggaaggtcgagtgtcgagggttcttgacgggtagacggaggaaacattgcatttgttagactttgtggcacatctgtggctaatggccatctcattctgatatctcagatctatcacaaccttaaaaaatcttccatgcaccgagtcatctagaccgaggctagcccgttacactctgtgttacggctccaagatgacctcgggagggtcagtccacccggcacgccttgacttagtggagaaataacgggcgctagacctgtcatctgcacagaatgtgtacacggatcttgactcgattccgggcccgactgtcctagatcttgattcgcggcggatctccattagctaggatctttccgaggtttacgctgggtcgatatgacgcagtggcttgatggctttgaggcttttatgttggtatgacccctatatatatacacatcatgaacgtccaggtaaccggactttcttgaaattcggttctatctccgaaaacaatcgattgagttctgaagcatacatgtctaaaaaagctcatccaatcaacgccttgagagtagtttcgaagctctccggttcacgccctaagatctcacgtagagtcggggtcacaaccgcagtctcaccccgtcggatagcctcccaagccgtagcccactccctcgacagattgacccccctgtaggtaagatggtcaccaatctgaggaagattcacgaactcatcgacagagatctcacggatcttgagcgatttcccaatcgcccgaccgataatctcaaccgtctccgcaagagagatctcccgaggcccagagagcagaagagccttgttcaaatacccaaagctggtcgggttcttgacatacgaggcaatcaacttggcggttgcctcgcccagctcatcgcgcttgacccacgccacacctgggcctgtacccgagtgagggatcgtaacctcgtccgttggatgcttcggatcgaagaatgcggtatatatcgggaaggattcagtgtagagaccctcgcggattatggtgtgggacactttctcttgcagagaagagaggtatttctctgtctggatatgggcgcccatcacatgagcgacactctggtcggttagatcaccgccgaatccaagggaggagtaaaaaatgtacttgacgccacttttgacggctgcatttatagcaagaatgtgtgcctggttatcattatcagcccaactcctccgtacttaggtgagctatcacacttgattttcttaccttggtcctgtgatctatctcgaatgatgcatatgaaaccagcatcaagacatcgacgccttcgaaggctgtgtctaatgttgatggcgcatcatagtcggccctccgtatcgtagcaccagcttgctcgaggtcgtgcagtttctcggggtgtcggccaaccagaacgagatcggattttgggactagttttgccaggtggttcacaatgcttgatccaaggcccccggaagcgggaaagacgccgattttggtacccattttgatatgtggcgagaatgatagaagggtaactcagtagtctgtagttgggaaggtatatataaaacacttgactggaggatttttcgagcctcttatatcctacatatcacatttcatgatcaaatgcttacaaatcgatatcagtccatggcaacaacgaccggatgcgatgattgtacaatattctctataattccatggatgtcgatccgttgccttttaaacaaagaatgttgcgccaaccttcagcgctgcctggaaatccaagtaaactccacccaactgagaggagtcacccaactgagaggagttatcccctttaaaattcattgcttgctcagcagatgggcaacctttaagcaaaggatcttgtgacttctttcattcgtcaatcgtaatttgaaatttcaagagatgagatatgtacttctaaatgcgaaacaaataacggccagggaagaaacaattagtctaattctaatcatactccgtgctcaatgaatacctcccgttccgaacaattccatcttgatgcgatcggcactcacacccctggccttgagactcgactccatatcgatcatgaactttccgggtccacagatatagtaatccgtcttggcatcatccaggaacaagtcctgatccttcaacttagtcaagtccacccgcccggcatggtcgtagtccacgccctccacctctccctcggaaggatgactcgtgtaggatgtggttcgaatggaggggaattcgtttggaagctcggagatgtgcaacttgaaagcacgcacgcgtgatgaacgtgcgccatgaatgaaatgcagcttgcgcgttgcgggtgatttggaaatcaatgtgttcagcatcgacgtcagtggtgttagacccacaccggcggagatcaacacgattgggttgcctgcttccgactcgacagggggaaggaaaaagtcaccgtagggatgggagacattgagcttgtcgccgatgttgactgtatcgtgtagcagatttgagatgtaacccgggtgagcggcggcacctggagcggctgggtcgaggcccagttctcttttcacactgatgcgatagtagtccggcttcggctggtcgctgagagagtactgtctggcctgcaagtgcttgagagccgggacgtaggtttggatggaaatgtactggccgggctggaaggccggcagtggtttttcatcgacaggggcgagatagaaggatgtgatttcctcggattctttgactttgttcacaatcttgaattctctccagtcagtccagccctcggcgtgttcgtaaagctgcttttcgcggccaatcatgatatctgcgagctgccagtaggctgcaccccatgcgtcgtggatttctggggtcaatgccgcgccgagcacctcgcccatggcttcgaggaggtacttgccaacaatcttgtaatcgtcgggcttgatatacaaggaggcatgcttgttgcagatcaactcaaccgccgagctcagtgcgccgagatcgtcgatatgcgatgcatatgcgtagagtgcaccggccaacgcacgaggttgatgcccattggcctggttggtactgttgaaaacggtgttcagctccgggtgggcttcgatcatgttgcgatagaagacagtcgtgatggtgttgccatgttccacgagaaccggcaccgtcgccttaatgagcgcgatctggtctggagtcattcccggattagaagccattgtgggtggtcgagtaaagaaaacgtttgatcggtgtctgcactgtggcttaattataagtaacagatcagaatatgtgagtaataggaaactaattgcatttggttggttgtcaagctatttatcttcaccgtaatcggattactaacagcaagaaaccgagtttagaaaattcggaaggcgtctggcatgatctgtgaagattttcagagatatctccgcggagagcaccaccgagaggcatatggcaacgcagcaagggataaagtcggtcaatttttgcgacctgcaactttagcttgtacataaaattgtctcgcatgttttatattcctggtacatgcagaaagtcatccactatgtaagctgtatgataggtgatgtgacccacctttagtcctcgtcgatctagatcctaatatttgcgagacgaggtgatgagtcttcgtgctcatgaaaatgaagtcgataatgaatagctctctgttcattgtgacattccttccatcttcctgaaggcagactctgctcttccgtctcaccgcttgccatgatctggcagaacacgtcttgacgaggacattcaattcattcaagatgcccaaatgcgacctctaaacagagagacaaatatctacgtcgatgagggtctttttttctctctgtatacaacttacaccattctgtatgttgagtcgtcatacacgtggtcaggccacacgcgagaatgtcgtcggctccaaacggcccggtttctgccgagccatttaataaacccgattgtccaggtgaccttgagagtcagaagatccgcctggatacttccttaggactatccaacatacatagtgttcaaaaagtctgttcccactgccccacttgctatccccctaacaaccatcgtggttttttttcttcttcctacacaccccccaatgacatttgagctatctgttactcagcgctcagctattatttatacccaccaggccggtgccacccagtcaaagctagcactcgattttaggtactcccgccgaacgatttacaatactttgaaacggttcaaagaacacaatactgttaaatctctcccttgaaccggtcgcccaaggatctttagtgatcgaactcgccatttactttttatactcgcccgccggcaccccttttggtcctataaaacgctgagttgtgctatacctggtcatccatcccgctctactattattaacgttttaaggctaaccggtcttctaaaatataggacaaaaaggaagattctaatcggaaaggaattagctcgacgacgatatcgttttattcaaaaatggcgctctgagtggtctagaaataacgtttaaaactaggtcttctcggatgagtattctatataacgaacaataaactatggaccacaatggtattggcgctttcggtcggaaggctatagaaaagatcttataaatactaaggcatacgttaaagatatttcataaatggtttagggtataatctggttagggagtcgatcagagttgattattatgaggcgggagaatattattaacctggaatcgaagaagataggatatactactatttcctatatagatactctcgaagaaggtctacttctattctatcgaccctgctctatcttttagcaagataacgctcggatccatactgctaaaatcatataggaatggtttgaaactcacgggatatatgtggaggagtagccgccgcactcactggatttaaacccgattgaacctatatggcggtggctaaaggttaaactttttgagttatttcctgagctgatatatataggaaggtctgaggaggattggatagtattcaaaaggtgtataaagatagcatgggatgctattccgcagtcgaagattgattcattgattttaagtatggggcgcagatgtatggcagtacggaaggcaaaggggtattatacaaaatattaaatttaaattttacccgagattggcatagggttcaaccctatttaattcgaagtaaattgagtaaagtatggtagtgctatgcatagatatgtagagatatatatttcaatgttcatgggtgaaaatgcgggtgggaacagacttattaaaccccactgtactacggagtacatgatatgaaatacacggattaggaggcaatgccgttttacccgttctgacactgccatcaaagacttttccctcctttttctgccgtcaacctggaaattttcacaggggagaagatattacccaacgaatgacagaggccacaaacacagactgtgcttgcctctaccatggtagtccttcatcggcgattctaattcgccagctctaacgtgcatagtaaattccgatctgtcaaaccctaaaggcgttcagagatctttcggtcgatctagatctcagacgctagcccaatcagagaagatcgacacctatactccgtacggagtagatagaccattggacaatccattgaaaatgacgtgtgggaagatctagacaccagactcccgcagccgtttgcggaaggcatactactctcgttcaacgttgactccaccaaaccctaaccttattattctctagctggggaaacaggagcctatcccacctcacttgggaaaagggacggaccactgccataaataagctccgtcgcagttgagtcaagcgctaatcgatcatacatggtccagttgcgacgcctccgtattgagtagtgacgtctcgatttacaatggttgtagtgcaaagaaagatggatagtagaagaggctgagattttctcattctgatgagacattagtcaactccgacttcaattagttctcttcattccggctcccttacccttcagaatgttgttcaggaaacgccactcaaccgaagcctcgacgctcaatgggacatccggttccagtgaacagggccagctgcccatgctgcggctcccagacaagctgcggtacaacttgctttgcatgctgggcgagttcgtggggactttcatgtttctcttcttctcttttgcgggtacacaggtgtccaataccccgatgccgccacctggctccccgccgaatacttccaatttgctgtattcagcgctttcttttgggttcgctttgaccgtcaatgtctgggcctttttccgagtcacgggtggtctcttcaacccggcggtatggtcatcaccatccaggaatgagaagatttgtagctgacattcaccaggttactcttgctctctgtctgagtggcggcatgccccctctccggggattgtatgtattccctgcgcaactggtcgccggaattgctgcggcgggcgtggtgagtgccctattcccgggcccgctcaactgcgcgacacgactcggcggtggcgcatccatctcacaaggactcttcattgagatgtttttgacagcgcagcttgtgtttgtcattatcatgttggcggtggtgaagcataagtccacctatctagctccagtaggaattggtctggctttctttgttgcagaactgattggtaagtgacggtcattatcggattactccacaacgtcctatgctgatccttcacactaggtgattactacaccggaggatctctcaaccctgctcgctccctcggaccggatgtaatcaaccgctcatttccggggtaccactggatctattgggtcggtcctctgctcggatcccttcttgcctctgcattctaccgactcctttgtatggtgcgctgggagatgatcaatcctggtcaggattataacgaggaagatgcggccagaaaggagtcgttgattggttcagatagtaccatcaacgccgatgcccctccaacatctagaagagataatgggtttgatgagcatgtctagcgctgctccattgtccgaaagcctgctccatggataactggcgatccatatcaaaccaacgttgggaagtactgaacaaatttttctattatttatatagtagaggccctcgatgttgccaccggattggagtcaataattcaaactggcaatgaggctgatgtataagtgtggatattgaattggaagcagatgcttggcatttttggaatacgagttggaagtggtcggcaaatgcaatcaagctcaagttcgctggtctacacgatgtacatagcagctacaacctaacagacatggtcaacgcaggtgtgtttggatgatttttactctttgggataaaagaagtgtattccccacgtcattttcaccattcccatctttaaattctggtgaaatcatgttatcgtttctgtaactgctttcattttcagctggctgtcctgttcggactctagcatgtctaaatggcagcagccttcctcaatttgcacttcttgagacatttcggacataatttggattcgacacggctagcttgattattccctcaatctctagggaggctgcatcggaggcaatatttcgcacaattcttgaactccgtcagaagtatggaatggacactgatattcactgtccctatcggggcacgttatttgtgatacactatatcggccatggtgtatctgaaacagaacagaagttcgggatatggtatggaccctaataaaacccatccattgtacctatagcattactgatatccactcccagtagaacacgcagtcctgatgcagttataatctcgtggccttccatctatcttaggatgaaggcagatgtcctcgttctcatggataaatcctactccggagactttcttcagccatgtcacagcttgcaaagaatattgtaacgcagtgagaattacgccgagtacctgttcgcaacaggcaacgagatttccgatcaaaacggtcccacttacgatgtaaacaacaattttacgacccgtctgacagaacttttacacgctgagccaccagtatttcgtactgttgtccgacttcacgaagctctctgtacccaagccaatgatccaagtactaagctgcgctatactcctcaatacatgggctgtcgcaaaccaacaaccatcctccattgtctcagtaatcacgggataatagagaacccgacaccacagagacacttttaagaataggaattataatttcttttccggctgcatagcagattttaattgaacaaacacatataaataaatatatatatatatattacttacctacgtttcgggtccttatttccgtgtctgttcttgggaaaacagttcgcggccaggtcggagagtggcagaggtcgctatcagaaatggaccccgagttgaccatcgaaggtgtttttgaccttcaggggtgttctctatgtcttctatcaatgccgttgtcgttatgggatagttttatacacccagcgtataaattcgtgagctacgtggattctcacaacgtcctggcatcgggtcccgttgctgatggcctctcagtgaccacgctaccagagagaccgaaggatcatgcatatgttgactatgtaatgctctctgacacggatgaatgatctggtgacacgatatgccggtgttttatctccatatttcgagggatatccctgctgtgatgaggggaggggtgtttctgtctttttagtctaaaccgtgaaacctgtgcaagattgtattcgtcattggtatcctttattactactgcttactctaacttccttattcgctcttgacctttactctaatcgcatcttaagttatgtctttgttcactctatataacggacaaagtatgctagggagtgggatcaataaaaaatatgttcaattggtaataaaatgctcgccatgagcatattaaaatgaatttgtggaatagccgaggtatttgtacagcctcagaacgccggcattaaatttctgtccccagatgctaggaagaaaatgacgagacaactaggaaaatcgtgaaaaaaggcgtggcggatatcatggctgaaataaaatccagaatcaatggagcgaggtatcaacaatttacagtgcaatcatgacaccaaggacaccggccataccagcagcaacagcgccgacagcagtgggacgagcgaaggccgcattgtcagagacagaggaagagctagacggagacgcggtggaggaagagccggaagaagactcagtagacgaagagccggaagaagaatcagtggaggaggagccggaagaagaatcagcggaggatgagtcggaagatgtggtggacactgcgctggtcagggtagtggactcggtagcggtggccgagccggcggagtcggtaagagtagtctgagcagaaatggcggtggcaacccggctggtgatctcagagccgatggagctagcatcggtagcgacggcagaagcctcactcttgatggatgaggcggcagcggcaccgccggtgctcacggcctcggcgatagaggtcgcctcgcttttgatggatgagatggcagcggcaccgccggtgctcgcggcctcggcgatagaggtggctattgagacgacatcggatccgacggattggccaccgtcgacgacagttgagacgacgcctgtgacatcggagacgatagagttcacgtcaacaccgtctggggaagccatggcagtggtggccaggaagagggcggaggagatcagagtgaacttcatattggagaaagaagaacggattggaagggtgttgtgtgatttaggaacaggatatttagattgtaaattaaaatgataaactggaaatccggggggaaactactgcttcttatatttggtcaatgggcactagtctcctatagatagaaacatcggagattgattgcgcctggatgctaggcagccgaggtggcagtggcgacatgagctcagccttgtgaagaatgattctgatgtcgatcgtagggtccattcagggatagaggggctatgtactcactccgtaccgtgttagagacctgtacagggtatcccaccagacggctttgggcaaattatatcatcccgaggtcctggggtccactttgtaatgaggcgcaagcattggagccgtttcaacgccctagtccctttcagtccctgacccccggaaaccaagagttagacgtgcatgttctatgagcttgattctcatgttctcgcgtgagcatggtttgtcctactcgtgagcaattcaacaacccacactccggaaaattcacatcgcagcaatgtttgggtattttgctgccttagcgatcccaacaactcgattcgcaccggagacaccggcaccgtccccgttggggtggcttggagatcaactgcccacaaagtggtagacaaatggtatgaaagcgcgtcttaccgatacagtgggtcaactcctgctcggcgtccgtcattatgtataattgtgacaatgaatcccactcgcaatttcaaagtatctcgacccctgtggcatttttggctagtcaaagatagccaagggatttcaatgacgcgtcatgtagcaggtttgagcgcctttaatattgcaaaggggcagcgaagaagccaagtgaatctgaatcataactggtcatggacgcagttgccgggggcgatgcgggtcggaatctatccaccggtcggcctgaggcagcacataaactcacgtgccagtgggagagatcaggtcatgtgggcccgcctgagacctcacgttggtcaggcggtcaatgctcacgttgatacccctagtttaggcttatgtaaatgctgtttggtctggaaatgtacggtatctttgattagatcatcccgttttggtatgaaatatgtggtatatttacaagggatacattcttgtatactagttatttactagttgtttactacctaattactgataaataactctacatcgaatatatatatctttggatatgcacgtataactacttacaaaccattgttccaattcgtttactagtagttaccatggcgcattatcaatctacctggtggaaacaccgctatcataagcttgaagagcttataaaggccgagcctattcctgaaccagacgagcctgcagaggcagatgtcgagctttacaatgcatccgatgatcggatcctgcatgagcgcaacgaatacgaggtatgtttttgaagaaatttactagtttcctactggtttgttactaatatttttcaaatagggaacggaagatgaaccaactcccctaacagaagctacccacgacgcaatatctactacagagattgaatatgtacctctccttccagaatatccgcgtactcatccgaaaggctatgcatatgtggttaatctccgacatctctcttcataagagaagaaaaatgcacttaatctagtaagttgttatataatcatcgatattatactagttattaactattttactaggtccagtacgctagtaggcgtgatggcggaaaaagtgatatttactgctccttccttggttgccaagtcacgaagacagcatcttactattccggcatgaagcactgtgttcatcttaacgactatctccgtaacctctcccatacagaggttaatgaagagcttgtagggcgtatgttctctataaagagggatgctcgacagtcataccaatattcgcaaccctaacgtgaagcggtagcgtatgcgacctattttactaatattttattagtagctaacaactatttagtttctacgatgctcttcgacagaaatttttggagagaaaagcttgtaaaaaagcagacgctacctgcgaaatggtctacggaaaattcaaccaccaggtaagtaaattcgttcttattctttttactatatctttactaatatatagcctctaataactagaatgtagtaggagaggaattgccattcgttcgttgttctaacggctcagctagtaaccacacgaatcattactttacaacattatatacaaagcggaacaggctagatatagggcttctgattagtcttcttcaaaaggaacagagggaagttaccacagaagtatacactgcaatctaccaaactagctcacgagcccaattttgcggtatgaattcatattactagtatattattattgactaactagttttatagatgttgtgcacctaggcggacgcggtgcgatccagagacaattcccacaatgcacagttaaattccgtacatttgtgccaaaggatatagagaagcatccatatgctatcttttactctgcagggatacataaccacccgcccccgccaccgagtaagccaccatacgaccttatagaagagctttggaatctcttatctcggggacaaacatcggatcttacacttagtaagtaaccttactagtattataatactattttattagatactaattagtatctataggcgcgtttcttcggagtgatggggttcgagacctcgccgccagatacggcgctcaaaccctgtctgaactataccagagctttgcaaataaagagcgattttctgtggtccttacaaaaaggagagcaattgactatccaatgggtagacatttagtaggtgtttacttcgagatggagaaaaatccggctataaaggtgcgttttactagtatattattactactatgctaattatcctttagctctatgtacgcgagattgtgtataatgaaaaaggtgcctttatattttgtgcccttaatgaacagctcgagatccttgcttcattacattcattcgaagttgatatgtcatataagcgagtgaaaggcgtttttaacgaggttatcttcgcaacatttgtcccaaagcatggaaaaagtttgttttactactattatatcagtatccaaagctaatatcttctagttatgacgctattccgagttttcacagatcaggagactacaaaagcgtatcattttatatttggaaatgtctttaatctcgtcgagcgctgtataggtaagaagatcaagttccactatctacatggtagtggaataaggtctattatcactgatatgtgcccaaaacaaatgacaggtaagtattataccttttactactattattacagtaacttactagtattagggcttggaaaaatgctccaggagactgaccagaaaaccaataaccgggatcttggttggagatggcatactatgaatgttcttatcttctgtaagatacacttcatacgtacaattaacaaattggtgccagcaagccgggacccagaagatctctcacatatagagggaagaagtcgactagccagcttaatggactgtaaaagtcgacagaattattaggagttggctgaccttattatcggtatatatttccatttgaaaaaactagtattttactaatatttatagcgcataaccctgagcttaagggttgggctgagcataagaagatcgatgttattgcagctgggctttgtaatgcatgctcgccaatagactctatgttcttcgaggaagcgcgaaagcatacaaatgcagtagagcaaagccactataaatcctatcatatgggtacacaggatacgctccttggtacagtcacgaagtgagtgaatattaattatttactggtattctaccatttacttacattcatttaggtcaaagatcctcgacgaaaccgacgtacagcaataccatagccgtgaagctttcgatatcagacattcctatcatacagatgatatgcagacacggtttagtaagagtatacagcgagagggtatgtatatttactacttatttactggcatctaactaataataattagaatctctgcgacggaaacgttaccaagtcctagatgatgatgtggcccctgaggataaagagctttatgagtttaactcttcaggcaatcattcaattcctcgggcaggatccaaaaaggctaaacgcggccgtggagcaagcagctcacaaggtcgttcaacaagtcgtgcaatgtatgtactctttactagtatgatactaattactgactattgatagcacacccgctgtatctaatcttcggcatactacgtcagtcaacactggcaataacagccaggatgagaatagcattgagagtttagaagatcagaggaaaaaggttaaaaaattgagggaggatcttaaacaacaagagagacagttagtactacgggaaagggaaaatactctctagagatagggttgcgatagggttacttcatatacaataatgtttaatatcttcaatttaccagttttatactacttttcactatagggttatggcaaacgccatgttttttttattttttatacagagaaacactagtaaaaagcaggataagcataataacaacctttcgcaggaactccaccaatagcagccaaagtaggaaaatactagttcttcaccagtaaagaaaggaaggctagtagtatcactcttccatttcctctccctcttccatttcgtctccctcttcgttatcctgttcctcatcctcctctacagcactagttacaaacagctcaaaattatcacaccggtcagcattagcttcacggcaacaacctaatactagttaataagtagtaaaaagatacatttcttgataatatcttaccttgacgatcatttgcatccttacacggctcacaaggaacctgaccaccaagctccttagataccttacgcatattggtaaggtgaagctattccaatattagtatataatcaaaactagtaaattagaagtaactcacagtgccatctgccttacgaggaagctcaggcttcacttgtactatagcagcaacattcgcgtcatactcatcccggatcgcaatgtagaactctattagaggtcagaatactagtaaaaaagtagtagaagaataccataccaacggcatcatgctcatcctgtaaagttggacgaccacccgaactcgccaatttcatatcagtatgcttgtctgcataatgcttcctgagattgttggtagacgtagcaggagtctgtaaggtaaattagtattagttttttactagtactttaacaaagaaatgaaggaaatgtcaaagaaaacccacatctttcgggcagttggcataacgacaaaagcgctcgccgaggaatagatcgatttccccctgtgtctattctctattagttttattcattttattagtagataaatagtatgctcacattgggatcgtttagttgagggagatctataccctccctcgatttcagggtgcagtaccatcggtatgcagtctgaatgcgaataactgttagtttcatcttcaatctctggcccgcctgagacctcacgttggtcaggcggtcaatgctcacgttgatacccctagtttaggcttatagaaatgctgtttggtctggaaatgtacggtatctttgattagatcattccgttttggtatgaaatatgtggtatattttgtacatatactagttacgatcgtttagttgagggagatctataccctccttcgattttagggtgtagtactatttgtatacagtctaaatgtgaacaactgttagtttcatcttcaatgtatcgtattttcatcttttctaggaccttttcatattatcttatagggttatacttatatacatcgcgtacttcactatggtagcggtagttatatgacaagtgatgttggtggttatataactaataaaaaagtagtatggtactggtaagagagaagtgggtaagttagttaagggaagtggtaaggtactgaaacccttaaggcacacaagaactcttggctggtagcctcaggctgctaaccctactgaactctcaggcgggcccacatgacctgtggtcactgccagtggcgatccgctaaaaaaagaaacaggggaaatgccatggatggaacatgctggaaattggaatagagaagcaatgactttcattaattattatctgtggtttaaattactaacaaaatgcatatgtccagtgatgatgatgcaatgagacgatgtcacgctgtaaactggccgtacacctggatgatggcttcccacccgccttggtggtctgattgacggggattgctctttccatcgagcaccattacatccgtcttgcgcgtgctgatcgagtaccaaaccaaattctgagggtcattcgtcacccgcatcatgttggtttggcagttcccctcgcaaggcatgttgtacagaccattccagtacccgtcgaaaaacgcccaggcagctgagttgtacagcgcgatgttggatccgccgtcgacgttcgtagctatcgcggtacgacacttttgatcatctgcagcacaccacgagaaatcagggtcaccgtatttggcgacagctgtccatggcgctggtgcggcctggtactcgccttggccttgcatatacggtgtttctgtttgaagaagacccgcaaagacgttctgggctttgtggaagttgtagttatacagccagtgatgctcggaaccggttccagtcagccaggtgcccttggtggattcgaccaagattccgcggcctgttgagataatagtgagagctgactcgctatcaaggttgtgatcggcggtccatccccagaagttctcaatatatgcggacgaactgttggtcaggtgcattaccataaacgcagccatacagtccttggggttttgcgacgtgcaagcactggagatacttgtgtcagcggtcccgcccaccgtcaccatcgtgttccaaagaccgatatcgccgggctgagcacctgcggcattgatttcaatgatcttggcccctggcaggatttcgccaacggagaatctcatgtcctgaatctcaatcacaccgacgtcgccaggattgccaagttgaacgacaggtctcggattgccggaatccttgaacttctccccatatccagaaataacagaccatgcttctccaacaatgcgagttccgactgggacgaagatagtgtctgagactcgatatacaccaaaggggatgtatgtcaccttgcacgaatcggcattttcagccaagatagcgttcaggcctttggtgtcgtcagtcttaccgtcacctttcactgtgtgtccagatacggtcttcacatttacaatatccgctgtgctgtaatcttgataggtgggctgggccttcgtaaagtatttgtctccaaccagcaaagcggccggccgctttgtttcccagctcaccccagtctggtaggtttctggaacaacagtgccccagacccatgtgtcgacatgagcattagcggccaatgccactttgccctgagcgtcgaccgcgatagcgttcgaagtatcgtgcttgaggttctgaatgagaaactgactattttggtttcctgaatcatgggacgagtcatagaatctgactactggtcccgtgttcgtggaagtggaatctagaagcactaggctacccagtccatttccagtcatatcgataccagtgccgcagctatcaaaagttgcttgttggagcaacaccgtccacccacctgccgcggagaatgctgttttgcaagattggaaatagatgttcttgaagttgacctgttggttggagttcttgatcccgatagctccgccaataatatcctacgctttgttaggctgctttttcttcttcttgggcttctctgaattacttaccacatccgtgacggcaattgttgacccggcattgatatcaatcccagtgtgacccgtggaatcttttggcatgcgaatcttgacatttgtcaaccccgacccttgggcaactccccactgaagagcagtgaagtggcggtccgggctgagggctgtcgtatcaacgatcacattcttgacaagcgttgcaaagctggtttctgggttgccattgtttgaatcgtaccccatgatgagatagtcaccacggaaacctggtgcagctttgatgatgggtgggttcaacggattgccaacaattatcgtaccaacagtcaggttgagagtggtttcaagctggtacacgccgcctggaaggtagacctgggcaggataccgcgtgacaccttgacccttgcgactgccgcccgccccatcatcgtctatagccttctgtaacttcggagtttggttaccgctgccatcattgacgaccgagtagtccatcacattgcgatacaccgggtagagcgacgttttggcgtagggagcaaatcctgctccttgctgattgtggtcctgctcgtccagccagtaggtctccggtgatttggtggtaggggcagcacatgtttttgtcgcgggcgaatgatctacttgagatattggactggacaggttgtcagcaatcaagtatcctatgagacgttaaatgacacatacgatggggttgaagcactggctgctgtcgtagtagcctgtgccatattcgaggaggagccagccacctttgtggccatcaaggtatcgtcagccttggatggagattgcacggtcgtggaaagagtatttgctataacagacgaagccttggtacatgcgcagtcatgaacaataacagtggatgatgtcccggtcagacctgccaaagaagatgcaagcgcccaatcaaaagggtagtcattatttgacggccttgcatgaacggttggagatgaaagtgcgtgcgatgaagacgcatgcaccaagtctagaggcacaatggcacctgatgttgtagacacaaccgctgcaattgcaaccaaagaagagaagcccctcatattcgatcgaccacaaaccacaacctcaatctcgaattagacagaaaagagaaaccaaaaagggaatgaatggatactaataaaaccatcgcaggtcatatgtcaggttttcttgcaattagcatgccaggtgatcttggaatgcacacgatcaccttgtatgaagaatgtatgtataggctttgttggtacatcttggctgaaagggccatgggtgatcgacgccccttgcaagactcgggattcgcaaccttcaggcatactatcgctataactccccttgtatcgccgaatttgttgatttcgtggaattctaggcttacattataatatgctgcatggtctccatcctacaaaacagtattaaatagcttcaattggatttacaacattgtgtagctcgaaccgttaaaggatctcatgaatatataccaaactgtacactatccagatcagacaaagtgatgttctaggttgtatcttgactcctaccatcgttaatgcctagctaacactcacaattggcgtcaatgtgatattggaaaataataatcagatgtgttatatgatgtgtttctaatgctctagactcgtgccacgtggtaaccggtggaacgtcggcacaatcaaggttcctcacgacaccccttgcattgggtcgaaggtccccaggtagtattgatataaacttccatgccaatggtagctatgcagcatgaagtatgcctccttctgattgcctgccgatcttatttgttagacttcatctccatgagtattacctcggcaggttctatacaaaattatacatgagtcatattcatgaggccgtcaaactatgacttacaataattccagctttggtatgtctcttacttggaatcttgcgctttctgcaaattgtaactataaatggagcttaaagttgcgtatctacaacatcccatactgcaatcgtcggagacagggaattgccaatggaacaaaatgttagaatctgttctctagggctgctaatttatctttctaaagcaactgcataatgatatttaggatatgtgaggtggcgagaacctacaaggccgagatttgcgtgggatagatttccgacgaggcgacacccgcaaacaataccctatgactggcgggaaaagggcttagagtcccgttgagttgatgatttcttcctttgaactgcatgaaaatgaattccctgttgattgccaaccgtggttcacacgtctaccccaataacgtctctgtgagctcatctagcgattatgatagcccaatttggcacgaagatcctgaaagcattagacgaaagaccttgtatgattcaaaagcttcatcgaaaagaggttcacaaactacaaactcattcgtccccgaacgatcggagactagatgttggcgaaggagtgaaaaccacgcgttgccttcatgtcggacgcatccatcagcagcttcaatgatgactcggacccagacaatacaacctcgtccgaagtttggcaggatgcgccccaaaccagtccacaagagaaagagtcatcaccccatattcgatttcgatcaaatgcgggtttcatacaggaggccaagcatgacgaaccgccaaaagtttttcgcgaagaatgggatttggctcaccatgaagggctgcctcatcggccgacaatgccatactcccatgagtctgaggatattgccgatacaccacagcgagatcgtgagccacagtcgagtgagacggacagcgagtcaggtgtccaaaggatagaccagaacaagcgaccgggaggtgagaagaaggaagacgagaagaaggaacatgagacttctgaacagcaatccacactggagaaatggcgaactgcgaccaggaatttcagacggaaagcatcagagttcggtgaccgtctgggtcgcccacaggccgagggagacgacttaacatccgggagatatcacgcggactgggcgaccggtggtgcacctccactctctgatgtgacagatgacaagcacaaaagtgtggaggcgaagcagcgcgaccagaaagggactagctcggaagcccatcgtctagtgcgagatctgacgcaagaccattcccaaaaacgccgcaaaggccgtgggaaaccttatcctcaccccgacaacgaatttaaagacgaagagaatgagacaggagcagatgcgagcttgagatatcgctctggcggcggcgggatcctgtcgcagttgatcaaactgcagggtggtcagcaacaaggtgctggaggccagtctcgaacatcaactgactcatctagcagcgcagaatcggcccccagcggggccccaacaccaaaacctaagaagcaaaagccagtgaaatggtacaaaaagcccaagaatacgtcgaactcgaccttgattggtgggggcgcagatagtttcagtggtgcaagcactcctgtttcaagcgaaatcctatcgcaagcctcgaggcgccgtgacaaggagggtggcggtggcggcggtggtggaaatcgcaatatgcggcttgaggatgagattcgagtgacagtgcacattgcagaaattatctgtcggcagcggtatatcatgcagctctgcaaagcattgatgttatttggtgctcccacacacaggcttgaagagtacatgcagatgaccgcaaaggtattggaggttgatagccaatacctgtatctgccaggctgcatgataatgtcgttcgacgatccatctacccgcacgacagaggtgaagatggttcgagtagcccagggagttgatttagctcgcctatcggacacacatctcatctacaagaatgtgatccacgatgtgatcggcattgaagaagcaattcaggaactcgatgcggtcatcaagaaaaagcccatatatcacaagttcatcgtcatcttggtgtacgggttggccactgcaacagtcgggcctttcgcttttagtgccaggccgattgacatgccgatcatttttctcaatggtatacttgtcggtttaatgcaacacgtcgccgcgcctcgttccgtgttgtattcaaatgtctttgaagtgacatcgacagtggtgacgtccttcctcgcccgcgctttcggtagtatctcccttggagtcgtgaatggcaagccacaatacctcttttgcttttccgccatcgcgcaatcatcgattgcattgatattgccaggattccttgttctttgtagtagcttggaacttcaatcccatcagatcatcgctggctcgattcggatggtctatgctctcctcttctcgttgtttattggatatggaattaccgttggcacaaccatctacggtctgatggacaaccacgcggtctccgacacctcctgcccagacaagggagcctttaagaatccatatgttcaacgtttccctttcgttgcaatccagacagtctggcttttgatcatcaaccaaggaaaatggaaacagcttccacctatgatcatcatcgcaatggcgggctacattagcaactacttcagcacgaagagactgggatcaaactcccaggtagcgaatacagtcggcgcgtttgtcatcggcatcatgggaaatctgtacagtcggctctggcatggccatgccgcgaccgctattctgcctggaattttcattctggttccatctggacttgctgcgacgggatctctgatctcgggtgtacagtccgcggatgaaattcgtcaaagcgtcgggtctcatggtagcagtagttcagcgcccggcgctggcttgcaatccaattctatattcagtctagggtttggcatgatccaggtggctattggcattacgattggtttgttcatttccgcactggtggtttatccatacggcaaggcccggagcggactatttagtttctaggctttttgtcacgccgttgacagttggtttctgatgttgatgttgatattgggataatgtgcataacaaaaagaagaaataaggaacatattctacgatgatgagtactgtaattcggcccatgtgaccaagcgcctatttagggaaagtagcatgatgccctaggaaacttcaactgtcccatggattgtactaatgctacatacatccgtatatgtatgattgaagtcagcgcactctcaaaccagccgtcacaactcagaaacatacaaaattttctacgatgctattcttctcactcaagaggggattcggaaaaaggagcgagttcttcagacacccccgaagtccccgcgagattagcagattcacagtttggtcactattttggacccccttcatcctgggtaatatctggactgcgaaagtaatagagcaggagagcaataccgacattctcattcggcgagagtaaatctattataatacccttacggaaatacggcgtgctttctaatgctcagatacctcccatactcgagcgatatcctgattattcttcaaattgccggccggtcgctattcccgaatgcctatatgagtcattatcgacgaagaaagctcaggttaagagcataagacagagaggggcagatgggatagaagaaggggactatgctacgtgggcgtgttcggttgcgcagaaatgtgatgagaaatggaagggagaagtccagaagagggaagagagggatatatctagttgggggtttatagcgctttaagtttcttcccaggtagatagctatcgtgggaatgaattgaaccagccaaggcacctttcccgttgtcttttgtgagtgaacgaaagcatgatatgaatatgaaggttatcaaagtgaatctccaatgtattaggaacaaaatacctactgtatgctaaagaatcaagtctagcatttctaggagaatagtgaacgaaatccgacaacgcaatgcaaatatgaaataacataagaattaaccggcgaccagtcgccagccagctcgctttaataccataggccctaaggtgggtcggggagcggcgatagaatcatgtttcgaagatattaagcgtgctctattctgtcatcttgcgtggttgttatgacctttttgtgatcttgagagatagcatgacccagaagttcgagcaggtgtcgttcgcgatatgtgaagacacgaacaccggttgtttgtaggaatcgctttgcatgctccaggatgagctctagatggatgggaggaaggcgaaagagggtgtcgagggagacagtgatttggtccggagaggtgttgagagatggaaatgaggcaagaagatggtgggtggtcttgtcgcgggcgagggactcgcagtatttttcaagcatattttcccggacaatgaagtgaagaatcgagtccaaggagccgggatggataatagcctgcggtagggaatgttcaaggtcggcgagagcgcgctgcattacaatcacatattgcagatcttcaatgagcggtagctctgttggtgatgtatgaccaaagagtgggcgatcatagccgagctgctttcgccagaaatagttgcataggattaaagaaataatacacgggatcaggacaacgtatccccaccaacgctcggcagtgaccattgaagcggcaccagcaacaagaccattcaacccattgacaatggcatgccattggaatccacggaaccgggtatgtagacggcgacgtatatcatcactcggctcgcgggcaaaaacagcagcgttgtacacatggaatcgatggaagagatagccagaccagatggcattgaaaaggccaaacactgcagcgagaccattcccaatatatccagacagcagattactagctttgaagacatgggggttggcgccgccaatcgccatcaaagtgccaacaccgaccaacaacgagccgaaccccatcaacacatccatcacgatccggtcaatcacttcggtgccaatttcacggactccaaccccaagccggctgtcaatgagccgggctagttctgcgttcttgcagtggtatttccgcaaacgttgtaggtgagcccgctccgctcgcagcagcttgacattgatccagctcagccgaaaatcatgaatagcaaccaacaccattcccaatgctagtgtaccaccaattcccatgagcacagcggcaaacttcggaacgggggtctgattccagacgttggcagcgaagtcaccggcgttggctagctcaaggtacccgacactggcgagcaagctgtttttgaattgctgctggtgcagtagacggaatcgaccacgtcgccggactagcacaacctgggtttttttggattccagggattcctgccatgtgatgtcactggcttcacggatgagtttcgggaccacgggtggtggggactcggccgttgatagtaagtccatttccgtggccatcgtcgtgggcttggaaattgactgtgcgaggtgaacgggagatggaggggtgaataaggtgtcagaggaggtggtaggggtcaccattgtaaaagtcgtatgcgggtgaccgtaggaaggagaagctcacacggggccatccatgccgatgctctgtacaaccgagtttagagggttgaatgaagattaaattgacagcaaggagggggagaaagacaggaggagatacaaagggacaaggagacaaagtttcgaagaagaaaagacacgcaagcacgtaagaccagggaatcatccggggtcttgagagttcacgggtggagcaagacacccgccttggcgtagccctatagggctgaacatatacttcggtttgcaggggatcattgtccgtgaacgtctacggtataatattgtacaaaaaaacctagctagtaaataaattgagtggaaatgagccacaggcatgatccctcaactcccaatacttacattactgggtgatacagcccaaccaatccaaggacctggcgatctttacatagaaaatcctaggcagcgacctaatgtaaactgtaaatatggtctaaaaatacataggggcgagataatctatgcctctttcgaagatttaacatcccctgagtggggtgtgcttaatgcacgtattagcttgactcctgcgtctgccatatccccggaatgagcgctccagaactgggcctcacggtcggatccacgaagcacatcattccagggctcttctttggtcggagagggagtgccatcgattgacggctctatttcattcgagctgtatacattgactcgttcgttgaaacgcacccgatgacgagtgcgaccgttcggcgagccctgggagccggaactgagggaggagttcctcgccagactagcagcaagataatccttgcgcactgcataccgtatagcctcttctcttcggatcgaatccgagaaaatcttctcaagggctgtagaagcagtgaatcgcatccccagatagacctgctcggcgacgaacaaagtcaacagaagcgaggagagccggacctcggaaataggaccccgatagacatgcacaattgccgctgtagatagagtccccagccaggccaagaaatctagccccaatagacatgggccgatcgaatccgaccggatgggtggtggtcgttggcactccagcgtgagcttgaagaagtcaccccgcagctccaaccaattattcaacaggaagccgagcggaaccagtggccaggcaactccaaataatgcgagatagccaaactgtacacacatctccatgatgtcctcctccacatggtattcctctgcgccggcctcgctacgcagtcttttcataaatgctgcttcgtctggagagtcaaccaagaacgagctagttgttgcggaatgcttccgtttgcggctgtactcggcctttccatcccgatagttttgccacttctgattcaggacatgcttcacatatggcaggacaacttcctcgccgaagctaagtacctgagccgtcatggaaagatatatcacctcctgctggaatcggcttgtatcgacctcgaatttcttgtgcccgctggccatatcggccgtgagccccgttcttcggaggatgtcgaagtatggaacaatttgtttgccgaagggaacatagacataggcggtcaatatcgtggggaggaaggaagtgataaaattcatgacgaaattcttctgagtcagggcaagatcgtattgatcctgcgttcggtagttctcgtacttagtcaagcgggttgcgatgcttgtgagaaacgaggtgatggcgggcaaggatagcgaaaacaggacggtcggtacgaattccagatactctttgaatggaccgtcgtatacctcggatatgaacacctccgatgcgaaggaggcaacgatcaatgctccgagggccacgcttgcaaccgaagcaaaaggaaccaaaagcagctggcgtaggaactgcttccaacctgggaagacatatttcacttgaccactgattgggtccttgacctctttctcccagacgtactgcttgcgatttaccttgagtcgcccaacacctttgacatcccatctctgactcaaatcggcctctcgaatcttccagtactcgacgaatacaacgcaccaggcacaaagtacagttccatacacaatggagtatggacctagatacagccacccaagaatgcccaatcctgcgggcaccacgaggaataacgaatagcaatggataaaagcgtagtagaaagcgacctgcacaaggttagctgtttgtcattaaaccgagccaaaacagtcacggataccttttcaccaaacaatgctcgaatcgcatccagatcgctagtcgtcaatacagtttttcgattccattgacgaagcatttgcgcgcaggcctcctgatcgtgtaagggaaacgaggcggtgatgttcttccattttccaaaacccggcgtgatgcctgcgcctcctattttcttttgccaggtgacggcatggtataccgaacgaatctcttcggctggtgtatcggcgtcggcgatagctgtctcgtcgccgtccggtaaggtatgagtaattccaaacagccaatccttgattctgtgaagtgttaattgccccaaaattcaatcgtatgacattcaagacccccaaaccccacttaccttgactggtgtactaaattcccgagatgatcccgcggaacccgaatgcagactaatagcgcttccccgtggccgtgacgaacctgaacccgaaggccagcctcgcccaaatcgtggatcagcgtccgaaactctgtaatagcttgggcttgatctgaggatcattagtatatatgcaaacggccaaggggatcccacgcgatttaccgacgtcgccaaattcatattgtaatacccaatccacgcccaggttatcgttatcatcttcgtcattgctataggccgcgagccaggacatgttggctaggtgtggcctattgagaagagcaattggagggtaacaggtggtcagagtggttcaagtggtcaaacacgtcacatcaaaagttgaaagggaaaatgtggggagattgcccttcaaggttgtcaccattacattattactctagttagttatgtatttttctatttccttctattttggttccacccgggtatacggtatatcattgctgaccacacagccctaccatttcaactcaactgctacctgaacccccgaaggactacaatatccagttgagattcctgaattgcacaattgccttccccagttcccatccgactcctacatacagtcgttatgctaccggaaatacgagtcagccccacaagtcaagcttcagccctatgagggagatttcatttgcatgaggatccagtttgccatccaatgataagcaacttacgatcaccatttctcaccatttctctgccatgcccccttacatgttcaggggaatcgcaattgccttttaagccaaaggaaatactcgaatgagttaatccggcactatataggcgacttaaaggactcccctgttcccaagggatgcgctgtggggtccactgcgggcacgtgcagttgtcggattggcgggaattggctagggctgaacaggagagagagagcttctggttcattaacgccctaagaaagcccccgtgaaagggccagttctctggtccagaaccaattcccggggtatctcctctcaggattggcagactgttgggtgaaatgctgttgcctacaaaactccatgccaagccactaattcgtgatttgcgacgattccaaggaaaacccacatttcattggagatccgctatttgcggtgaaagttccccaacgtatctgaacaatattggtgccaagagtggaggcgggaaaacttgaatccatgacggcgatggcgcaggcatcaacaatccgcaggtacgggctattacggagtacatacagctttctgctgaaagaggtgctctcagccacaatgttggggatagtacccatccggcgcttcccatcgtggctataagtacatggggtaacatgcacgaccgagcgccatgagatcatttcccacgaaaaaaaccttttctttcctggcgattattcacgttattcacgtccctagcggcttaccgtatgtactcgattctcgagatcatggcccgtcggtttcctcgtgggcagaatcttaccctcgggttgagtgtcttcctctttatcttcatgtttctgcctacctttgttattctgctagccgtcatcgtattctttgggctggtgtatccgcgattacgcaagtcgtacagccttgaccccgaaggagagctggagtctcggcagtcggaaaccaaagattgaatgatcggagcatggtatgaatatatgcaatgtgctcggttatgttcaatcactaacgtgtgtaaagataccatctgggtgtaatactattaaaccctgctaccgagtccacgaaaatgcattgacgcttcttttttttttttgtcggattgtgcaccaagcacaggatttcgagggcgttttgggtgtatcttattgagttcaagaatctgaatgtttcatgttatttcaactaaatgaagatctctagtcataagatcttgaatagagaaacatattatttcttgcaatcctgctgtatattaggtaaaagataaacctgaaacaaatgcctagcaagtctagaacgaaaatcacaatgtcttacatatatgtacagtcatgtaactaaacattaactagtacaccattcgtaccatgactctaacgggtagggctgacacggtacatggttgaagggctccttcctctttccccgttcctcccgaggtctctccgttcctctttccccgggtcatctccttcatgaatacactggatcaaaatccccatccaatcccatctccttgagagtcctcttcgagaacatataatgggctgaacagattcattatcttcatccatggaagctggatctttccagaaaacagagcagcaccccctaaataacaccccgctcaatatctgatggcatcagcccaaccgctcagggtattcatcatctcacccgcctctattctgactcaggatgcacaacaaacaagaaaagcagctggaaatcgaccagccactgcctgatcggtttagcttcttttcgtcaaaaacccgacaagcgaccgcctcgtcgacatgggatggtcttttccccaacgaaaacattgaccatatcttccaggagaagcttaaaagtcgcccagatcccaaccagccaatctggtggattgacatatgcgacgccaccgaacaagatgtcaatgccatctcacaagctttgtctatccatcccctgacggcagaggatattgctattcgtgagccccgggagaaagtcgacgtccacaagaactactacctgatctcgtttcagaccctcgtggtaaacaaggtcaatgagcgaccgggaattcccgtctcggctgcattatacattcttgtcttccaatatggcgtggtcaccttctcgcctagtggttgtgggcatgtggctcgggcgcgagagcggattcgcaaaatgcatgatcccactattctgacgagtaactgggtttgctatgcaatgatgtgtgttcaaccattttcccgctcagcaacccccttttcaatggatgcacggctaattgatcttcagagacgatatcattgacagctttgggccatttgtccgggaggtggagcgcgagtccgaagcaatcgaggatcaggtgtttatcagtcgcatcgatgacgctcaggctcttgttccgcagattgactccctccggaagaaaatcactcacataatccgctgcctcagcggcaaggtcgacgtgttgaacggattcgtgaagcgctgccaatcccccgataagaaccctgttttccctgaccgtgatctacttctatatctcggcgatgtccaggaccatctaatcacgacgttgtcgacacttgggcacatcgatgagatcatcggtcggtcccaggcgaattatttagcccagatgagcgctacaaatctccggttgagtctgactattaactctggtttgagtaaggtcactcttctggctacgatcttcgtgccgtgccacctggtcacgggcttgtggggaatgaacgttcctgtcccgggacagcatgctagtgggctagggtggttttttggtatcctcggttcttttgcggcattcatggtcatttgcatcgccgcggctacgaagtacaaacttttgtagacgttgaccgatggatacatttggcttaggatattttagtgctaagagacaatgtattgaatatttttgctcattccttctctaattctaggcctcgtttttcaaaataaatcaatggaagttattcacaggtattgcaaagctttcgtagcccgaatggcgacatatcgatgctgatcaacaccgatattcaacggtcggagccacggcattgacttagtcccaccatcgttgatcatcaattcaatgccatagattcaacagtgggcacttccggcttctgcgccgggtgtgccgtcagctacacacttctgagcaggcatttcttcctagtattttgtggcgctgcttggaggctgtgtggtggagtcggaatcggtcgtcggcccaagttcgtagctgaaccagagttcggtggtcttgatggtcttgtatatacagcatcaacaaattctagacaggcgaagggggagaagaagagttcgctacgccggtcaagatctcggctgatagggcaggcgctctcttcaaacaggaaagatcagcatgaactttgttatacacaccatcaactgtcattattaccctctgcattccgtactcgatagctgcttttcttttggcttgcctattggtctcttcggtatcttgcatattccgtgtacatcattcgtgcataatgtactccgtactgatccgaggatacctgatagggtcttacctctgggtacgtgcagggccgacgattgcgtaatgtggcaggcgagttagtttgttagttatcggtgtcaaccagtgagtcagattcgaaaaacaccagtgggtccgacgatggcagattgtggcaatagctagtgacacagccacaacagcaagtacctgtggggcggaaactccacaaaccaacgagaggcgcagcagaccaacagctgtacatccatgtatcgagagatacggagtatgtgttgtactccgtaggacagtcggacatgggtggagccgttctgaaaatacttaatgactagtggtcaatgaagcacgacagcgcatacatccaacgcacattgtacattgatgtactccgtgctccgtagagtgtacagaaagcgccctaaggtgtgacgagcacccgaggagaataagcgaaaacaagacctcagtaccaataataagagcacccaaatacggggcttgatggtcgatcccgacaataattcaccaatgatgttgagattcgtggatagcgcgtcattgctggattaaattggtccaattggtccaatacagagtaacccctgcagcattcaggattgacatcatgctagggatagtatagtatagggtgacgaaagacaacgcgaggctaggaatgtttgcataggttaacggttgtcaaacattccttgaaagagtaatcaggatctgcagggctgagataaaaggacggaaaaaggtgtggcgttggagaatcatcacgccaagctgccaaggccataagtctggccccttgagaagtcaactgtcgacttcactcttcgctctttcctattttcacctactcctactatcttatcatcatcaaaggcttgttgccttctttcatctaactttttttctctgaaatacatgcgtaagtagtttcccagaggaggctcaaagctatagctgtagctatagctaccccgagatcttgtctccactcctatgtatctggctaacgatgttcccttttgcagaccggattcactcgtgggcgaaagctcacgcgtcttcaagcggcctgccagaccagtctccctccgaacaggccgccgaccctgttaattccgaaaaaccttctcaacatggacaagtgaatgtacctgtggaggaccccactccggggtccgtcacggaaaccaacaccaaaccgggtcttttgatccgtatgcgaaacgggtccggccgtttctatcaccatactgcggatgctatctgccacagctggattaatgtcttgctgatatttgtaccggtcggcattgcctgtgaggccgcgggtctcaacccagccctcatcttcgcggtgaatgcagtagccatcattcccctggctggactgctcagtcatgccacggagagtgtcgccagccgacttggtgacaccatcggagctctgatcaatgtcacttttggaaatgcagtcgagttgatcatcttcatcatcgctttggtcaagaatgagattcgcatcgttcaagcttctcttctcggctcgattctcgctaacctgctcttaatcatgggcatggcttttctcgctggtggccttcgcttccgagaacagatttacaacagtactgtcactcagatgagtgcttgtctgctcagtttgagtgtggtcagtctcctgctgcccactgctttccacgcctcatggtcggatagcaataatgccgatcgcgagacactcaaagtcagccgtggtaccagtgtcgttctgctgttggtgtatattctctacatcattttccaactcagaacacactcgtatctctacgccagtatccctcaggccattattgacgaggaatccaaacctggtgttttggcagaatttatgaacagctcttcggattcgtcatctagctccagtgatgagtcggatgacactacaacttcctggaccaccgccaaacggatcaaaagagcaatgaagtatcgcagacaccgaaagtcaagtacaagctcgaaagggacaatctctcataattccttccagaagagggctatggcatcgacttccaatgagaatcacggttccatctccaattcaattggtagcaatgaacacgccattgagctcagtgatgagattcgttacgatgccgacgacgacatcctgccctcttcggcagtccgttctcgcgactttggtttggctctgagccgcatggacagcaaagcgagtaagaagtcgaagaaacgagatcacaagaggcgcgagacccagaaagcagagaagaaggctcagatcgaggcctccgaacacagcggtccctccgatcaacgtccggtcctcaagggattcccatccgcccctaacgttgttggcttggaaagcgtggatgatccccggaaacgccggtctcctttcggacctattccgtctctgctttccaacactgttttcagctcccagtcacccgcgggctcaccccgtatgggggccacttcctcgcggccaggaatttgtcgcagcaactcgctccccgcacataccagtcgtcctccgctggccggaaacgcagtacagttcgcccgtggcgcttctcgtctaaccgagcataatgatatcgtgggtccggagatagcttctcaggccccggaacccacaatgtcacgtaccgctgctgttgtcatgctcctgctgtccactgctttggtggccgtttgtgctgagttcttggttgacgctattcccgatatgatcgctagctcaaacgtcagcgaagctttcattggtctcattatcctgcccattgtcggcaatgcagctgaacatgttactgccgtcagtgttgcgactaagaataagatggacctgtcaattggtgtatctgtcggtagtagtattcaaattggtaagattccatccgttttgatgatgtttctacgtgtgcacattctgactatgccaacagctattttcgtcacacccctggtcgtcatcctgggctggtgtatggacaaggacatgtctctgtacttcacgcttttcgagacaatttgtctctttgtaaccaccttcgttgtcaatttccttgtactggacggccgaagcaactacttagagggtgtcctcttgattgcagcctatattatcattgcgtgagtttatccctgtcctcggtctcgcttcaatgtgctaaacatttcttcagcctatctgcgttcttctacccgcctagtacgaaatcaagtgttatcgcaggctgatgagcatatttatgaacccgcgctgatgggatctcgagcgtgggttggttgcgccgtcaaaggtctgtccgctgattgatcgcctttgatcgccagcgctagagcgccattgataaatacacgcctttaattccactctttcctcgaacgatatgttattactggtatgcaagtcggtagtagtgcacgtagtgtgagcaggaataatataatcgatgtatatccccaagatctcgtattgctggctgggaatcttctataattaactgctctagcaacgcgcgttggatgaatcacgggaaatgctccatccgtggccgatcatcgcggtgctcgtagagcccctggctgcctgctattatgcgacctgagtgctttagttactcaacagaacgacgaaagacagttcggcatttccctcggtcccactgatcagcctacaagaatcgaaagagtatcacttagactttggccttaggaaacggctcatttatttccaagcccctgacgatctcaggctatgacaatattcacactatcctgtgcgtagcttaggacaatgcatatccgctggctcttcttccgctctacggcctactaggataagcacttttctgcctctcccacgcgggcaatgcccacttcaccatatactgggacctgaggagttggtccgcctgggtcgttccgcaggttcaaacgtcatcatagctctgaggaagtcctccaacgcacgtagttcaccacctgcaacgtcccattgacacgtctgctccgtctcgccacggcccatgtcccaaagtcgctgacgcagaggccggaagacgggagtgctgatacggcggaagttagcgacccatgacccatccttctcgaagagttcggaacgattcgcccaagagtctcaccatctcatgggcggttggtccagcgtattgaccatttcggcgataatgtcatctcggtcccaggcaaatgtttcgaagagtacgcgctcgcctaagagttcatacaagttaacaccaagtgtccatatatcagctgcggtgggttgaatgatgggttcattaaataaatcttctggtggagagtagagagatggggtatggagagttggtgagggagtctgtgccacaataaaggacgtcccgtagtccgagatgatgatttccgggtcatccaactcgttggcaggcatgctcaaagccatgggatagatggcatagggtggtgcgtggggttcaccacgctttccacccagtcgtatgataggagcctcgtggttgtaccaaaacgcttgtatagctcagatgtggttaggccgtcgaagttcggtatgcgtaagagaaaattgcgcaaatgaagatctgcttgtaattagtatgcgggatcagtaagccgggatgcacaacctaatgacccccacctccgtggaatatgccgtttgcatacaattgagacaaccctaagaggagctgggcggcagcagatctagcagcgtccggcggaaacatgaatttgggctgtcctccttgggattagcaacattggcaccagcaggctctccgaccaagcaccgatgatgtccatttggaccatgaaacgagaattgacctagtagcgatggagtgaatcgctttccagaatgagcgaggtcgctcttcatcgggaagtggttatctggcgatgctcttgcagtcagtatctttagggatacatagcgctggcgttggtgatcgcgggcgagccaaatcgttgaatatccaccaaaaccaagcttgtggacgacggtgtaacggccactacacaaggtgtctccgatgagagttgggtggtatccgccgggtacatagtcctcggaattttcaacatctgcctcaggatggtatatatcttccacttgtatatatgaggagtcagtcatagcatgaaggcatcgaaatgggtgcggtgacggagggactctgttacgacggctggtctttggtgtgaatggaaaccggcacgggaagatatcctgattttgtcggcgaattatcgcgaattatcgcgaattggaagaatggacgagggagtctccagccatggttcaatttaatcttcatgtctttgccgggatcatcgagtcgacgcgctggcagtactgaaagatggtgtgtgactgaggcctatctccaccagccacgtgtgtgacagtcagtggctgtgttttccacagctcggttgtccgagccacaagccacatcgtggcttggcagtagcacacgacatattgattttaccgcaatccttaatggcccccctatagaggggaactctccactgcgggtgatattttccctggacttattattatttggttgtatacggagtatggagcacggagtacatcgttatggacccctttttatacgaattatccaaaggccgaaccgtggaaataaatagtcaagctcccgagtggagcaaagtcgctcctgatctgtaaagcaacccctctactccgtactccgtgctctgtacggagtatgtatatacggcttattgtgacacgctaacattggataggggtcacttggcatgctgaaatcgaatcggtcatttggctgagccctgcaaggcgatggagttgtcaatctggcctgtcagctccaggggctcgtgctgcactttatatcgcatctgcctaatcggagtagacgtgaacttgggcgctaacatgtaactcctagaagtgggggcatcattctagtgttggacagatttgtggagttgtctctttcggttctgggcggaaggtgatggtctacaacagttcgcgctctttcccataaaagccctgctcgctcccccatttctaagttatcctcattttctcttccctccttcatctctctatcaccattcattatgtcgtacgctccaccttacggcgatccttatgctcgccctccctcagatcgcccaccatacgacccctacgggcgcccaccttctgatccctatgcgcgccctcctcaagatccatataaccgtcccccctacgacgctggtcgcccagcatacgaccgaggcccatacagtgcacccccgcctcaagcccgtccccctccaggccccccgcctcccctgccccagggctgggtccaggaatgggagcccagtactcgtcgcgcattctatgtagagcaggctactggtcgctcccagtgggaggcgccttaccagcagcctgcctactctggttacaatgatggttctcgcagtgttcctcctccccagccccaaggaggctactatgcgcctccccagggccctccacctgtgtcttacgatgatcgtagcgctggctactatcagcagcccgagcctgagaagaagagcagcaatgctggcaagtatctcgcagctggtgctgctggtttggctgtcggcggtatcggtggtgctttgattgcacacgagcttggtatgtgatctctctgtttgggttgaatggcttgtttttgcgcatgctaattttttatttttttagacgaggactcggatagatcagatcgcgaagatgcttacgagcagggccgtcgagatgaagaagaagaggctcatgagtcagacgatggcggttggtgattgtgttcacccatgggctgttgcttgaaggtctttcatcggtccatcgtttttctaagattcacaatcttttttgctgggattgaggcttgcattttgcgaaggtttacatcattaggttgctatcacttagcattgcatcgagatatttctctactatcattttttgaaaatgcgaaccacctttaaaggcaacaattgttccatctttacttccaacacaatatctccccatgcaacaacccaaaccaggcatcttcatcttccacaaactgtctccatccccttgcaataacttccaaatcctctgactctgcgaagccctcctcgacaacattcttcgcaaacccagaagatctagccctttcctccatagatccaccccaatacaccctctccccgtcactcccaaaacaccaagcccccgcactcttcttcactctttccttgtcaaacccagcctcccgtgcccaaacatgaatcatcctcccgggatgtggatgaccacctttagaaatttgcatgcgctcggtaatctcgcgccacttagcgatccccgcagactcgggataccagctcagctctgccgactcacgacatgcaacaatgccgccgtccttaacgacccgcctcatttcctttagcgcatgaactggatcagcgatatgttgcagaacctgatgggcatgtaccacgtcgaatgtattatcctcgaatggcaggtcgtggatgttcccctcttggaaggtaatgttggacacgccttcggcttgcgcaagggcacgagcgccttctagtggatcaggtacgtactccacacctatgacatgtccggatgggacctgttttgccagggaaattgtgattgagccaggtccacagcctacatccaggattttcatgtctggctttaggtgtggcaggaggtatggcgcggagttgaagactgtgcgccagctgtgcgtgcggaggaccgagactgaatggtctgttgtgtagacttgagacatattcgatgggttgtggagttgtatttgtgattgtaattgttggttttgttgaaagagcgttgttgggtgaggtcggcagtggattttatagttgcgggaatctagacctgcttcggagttccgtaatgatcttcaatatcagtggccatgccttttaaggttaattcaacaccttcaacttggagcattcaattgtttcttgtaaataactcgtgaatgataagagtctaaaccatgagatcaagtactaggcaacaagaacctgactttagcgtcacacagtaagtgcttgagatacacaaacaatgcgtgtttttcgaaaccacatacccaaaagaatgcaaagtgacctgtgtacatagttactgttaagcgttaactaagaggtgcccagcatgacttcatagcttggcatttagtgcggaactccgaaaaccttgccggaattccgaactctcctgggattccatttcatcttcaatatggacgaatcagatagatacgagccattaatccctgcttcacctcgatttctccgcactgcgcgaagaaaggcatgccgaaaatgtgtgggagctaaaactgcctgtgatctcggaaaaccgaaatgcaagcgatgcagagatcgaggcacgagttgtgaatatccaacacacgtcaaatcaagaagtgctgctagtgcagagaatcaacacgccactgtgaatgtctgccctctcagtaccatttcttatgcaatatctccggattccacattgccagagggtttggtcagaagcactgggaatatatctcacgccccgagttaccccattacggataatggaccaattcgtccagataccactgctggcctggacttccatcaaattgatctagttcccatgaccgatgcagaggaaattcgcgatcgctggttacgcccctacatctcgagttcgacgggccaagaacccaagcagttgaatgctcacaccatacagtatctcacctgcgtgttgaaatcgtatcttagaaatctacttaactcaaaggcaccgccttttgttcattcgatgcagcagatggggacttgtccgcctgtcttggcttattgcttcaccctggttcggacatggttgactcggattcctgggtgtgaacctttgattttgaggacgatgcgggaagagatgaggaatattgaaaaccaagtatgttggcaccttattattcgttgcatatctgcctaatattacacaggatgccattcgaagtgactttgatagcctatgctcgttccaggcgtatctcatctactccatgacaatccatttcttcccccgcccagacaccgtcgaagaacccaacaacttcgatacccaaacgcagataaaattacaagaaattgctttccggtccgccaaagcaggtctcacctgcagagcagaagaatctcagacccggccgagctgggagtcatggatagtcgcctctgccaaacgtcgtaccctctttactatgtatctttttaccaacgtctacaatacccagattgggctgccaaacttcgttgctgaagaattgagagggattatggccccggaaagcaaaatactctgggaagcttcagatcgtgccgtctgggaaagagaatacaatcgccacttgtctcgctgggaggatacgatgctcgagatatcagagctgtggaggtctgctgatactggaacagacgcccggcgggagagaattgagcggtggctgcaatctgctgatgagtttgggatgatgttattttctgtttgtgcacatatccatggttgctagtcacatatttctgtgggcctaatttgagagagagcaaggatactagataccgaataaatttagatcaaaaccttgcagttgcttggttgcattgctctgtcacaatatacataaatcgaatcgaaatgtccaaatcacttcacttcttcgacatactggccatctgctcatctgcagaatccagaacagccttgatgggctcctttgagatcatgcgctcaagccactgcttctcgtttgggaactcatcaacgtcgaacccttcatcaacgagtactgtatgtgccgccttttgccaaggaatgaacgctatatcagcgtatgacatcttgttgccaaccaaccagggaccatccccaacatgcttgtcgttggcctccttctgcttgcccaaccacttgtcaagcacacccgtcacacgtttcgcttcttcaacatagcgcttcactgcgctagggagcctctccgcgtggtatctcttgaaccaataagcttgtccgtagtacggcccttgaccagagacttggaggtggagaaacgagcgtgcaagctcggcttctgcgctgcccggtgtaaagctgagcttgcggggttcgttggtgtcgtagcgctctatgaggtattcaataatagcgccactctcccagatggtcaggttggtgtttgggtcatggatcgaaggtaggcgcccatttggattgatcgcttcgtactcgggttccttgacttgagcgaagccgactggaacggattcaaatggtacttcgaggagcgtgaggatgattcccactttgaggggatttgggccaagaatgccaccatagagctgaatgggtttgattgtgggtgacatgttgtgattcaactgtgattgaagctagaattgataattgtgatcatatttacagtgacgggtttccattttatatgtcccaggggttacgttcaatttacttcttctcagtcattctttgtgattcctattatcaatcgctgtggatagttaacctgttggatttgtaacattgtccttagagttcgtccgttgtttgtccgatcttcaaaccgcgtctgaatattaagtaatcttcggactcgggcaacttttaagtccgaagaccgcaccttcggactttcgttattccgttgccggattactcaccagtgggccttccaaccttggaaggttcccccggggccgaggtcccgagatcccgagatccaaccatggattgtaatgaagtcaaagtcgatcactctatgaacatcctcgccatgaagcgtcatgctacccgaaatctgatatatacttgcatcacccatacgactattttgttaattcaatcttgaccaagatcactatcatgaacgcaatcctataggctacggaccatctccttaaatacacatccgcactcagaagcgaagtgcggccacggtaggggcagagatcgcgattgtaatacttcgggtcttatgtctccttggaatttgcagtggctgggtagtaactgatggtgaaggcgaaggagtgtacggagtagacgaggtgctcttcatgtctcattcctgagggcacacaatgccgagaccacaaccccgcactcgtgacatgaggttcatatagagatgcctccgcacttttcattttttctccttgtccatgtccatgtccatcccctaaaatcaatctctctattacacatagctaaatagcatcaaatattcttctaccatcaaatcgatcaaacatcagattagtcaaactctcccgaaacctcttgccgactcttgcgaggagctaatgtgcacatgctggcagccccaatcccatatctaccgaatgtgtaccaattccggtctgtttcatacttttcctaccactattgggtattaaaccccgacgacgacaagttcccacattctcgcaaatgtgcgggtgtcgatcgttgtttgcctctagatacccaaagcaatggcgacctttacggcatgttgacagtttgaaacctgtctacgtgataatgaggtctcctacattcagatacataggtctcgaacacatcaagcagtatatattctcaatgtaaatatcatagccaaatccaattcatcatttaggtacatgccacaaagttgttgccgctggcaccggtgtgagtaatgacaccagctagcttgtcggcgctgttgaagataacacggtccgcaccaggagagctaccagtatagaccttgccactgctaagaatggggaactcgtagtaggttcctgaaacgggaaagctgaagccttcatagttgtggtactcgtgagggtagctggacacagcatcattggcgctgtagagtttgtatcccgctgcctgggcggcactgatggcactgctggtgtagcagactgtgccgcaagtcgcggcacatgcgcgagcttccacatccaacggggcagcgaaggcactggatatgaagacggaggccaaagccaggagctgaaagttgtgttaatagctgatggttgatgctattgatctggaagagggtattaccttggtgtattgcattttggcgatgtggttggataggaaatttgagtgctcggctggctatgaatatttctggagttgtagaccttcaatgtttctgggaaaggtgatggtttaaatatgccttgtcggaagtctttccgcattgtgaagagagtctactcgctatcaatgcgatgttacattctgtgtatccagccgtcttggtcttaattggcaatcgtatactgcaggtccaaatgatcaattgacaacaaccataccgaatgaggtacatccaccgagcggtgaccatgaagtatagaggtcaaaccgaggtactagatagtcccgattggtcgattggggacagcgtgaagaatcgagtggtgctaggacttccggagtcctgaagatacgccctatccgggcaggtgatcgacgggcggggactatgtgggatggagtctcttccttagacccatgcgcctgagatgaacagggtctctctatcgggccaatcatggcggcaaccgtcggacacgatgttgatctaatggtccattactcagccggccatgtggggatagacatattgctgtcggcatttgaacattgagtgagaaacagtggactgcatgcatctagctgtgaacaaaatccaagccctttgcttgtcgagataaggtatttcactcaattgcgcttcgtatatattgttttcccctcatgtgtccccgtgttccgacggtctccgtgctgatcgcttgaattgtcatatctggcccgctgggtgccaactaggcatgttttgtttcttgcttttctgttgtcaatcgcacaaggccacattcggcagttaccctttacacggtggattagatgcaaatgtgtcatatgctagtctgcatataaccgaagggtagcttcagattgtgtatggatgggtatagtataagataaagggtgactggtctaccctataacaacggaatatatgcgagaccaccacttggcaacctttttggatgactcgggctcttccgaatcgacgagctcccttcgccccgtccagatgtccatatcctccagtcggacgacacgggttttattccagaacttgtacacaaccacaaacaatacaaacacagggagcaggatatagttgatcacaaagtccgtcgagctaaagggattgaggaagcaggtgtacccctgaaagaaaacgaggaaaacatttgctgccagcgcaaggtaggttccccatgggtaaaagagagcctggtatgggagctttgatgggtcttggccttgcgcgaccagggcttttcgaaatcgaatatgcgcaactccgattaccgaccaaataataaaggtagcaactatacttcgtcagcagggaacaatggtgggaacgggcaaggaaggcaaacataccccccgaaagggttatcaatgccgagtagactctcccagcactagaggactgttccaaaaacacaatgcatgcgaagacgttggtgaaaactaagccaacccatggaactccgagacgatttgtccggccaatgaattttggcgcttttccattgcgagacatgaaaagcagcgttctagatgccacataaagcgagctatttccagcagaaatgacactaatcacaatgagagcattaatgaggtgggcagctgggaggatcccagcatcctgtaacgagattgtcaagggggagctggctgtcttcgacgttgtgcccaacaaccttttgtcattccatgggatgagcattccaatgaagaagatggtacctagatatagttcagtaatgcttcggtcttctgttttatgtgaactcaccaacgtagaaaatcaggatacgccaaaagacctgcctgatagccttaggcactgcttttcgaggattcgtcgattctccagcagtgacaccaaccctaatttgactgtcagctttcgccattttctatcatcttcgatattggggaatatacatttcagtcccagcatacaacgccattgattgaatctgcgaatgcccccggggcacgccaatattcaaatccaatggcgcgcggtccaatgccacctgcgctgatgataattgcgagaatgaaaaagacaatcaacgccaacaccttgatactgtattgcattagtcagtttcatgcttcaaacgtaagcacgcggaaacgtacagagatagccaaaattccatctccccataggccaaaattcccagatttgacagggtaaggaacatcacccagaagatcaagatccagccccattgaggaacagcatctgtccagtacccaattactagcgatatggcgttatattcatttgcaaggacctagagtgtcatgttagtaagggatgatccataatactcgaattcccaatgtatgccgtacagttacccataagtaccaatatgcccatcccagagcaaacgcaagagagtcgtcaataaagcgctccgcatactcggtgaacgatccagtcacggggagtagcgtggccatctcacccagcgattgcctgtagccattagaatcattcttagggcaaggaaatacaccccttacatgacgaagaagacgataatgcccaccagcgagaaactaatcaaagcccctgcgggtccaccctcatgtagtgcattgcccgagctcaccagcagaccaggaccgataatgcctgagaatactttagtcaacaccaactacgtaaaacaatgtgcaagcccacctccaatagcgatcatctgtagatgcctagacttaagctgccgcttcaatggtgcagacataggatctgttgcaatctcttcatccgatcggtttatctccgatcggaagcctttcgtagtgccatcctgaacaggtcctctgtatgttatggcgctgacatccgttttgtccgtcatattgaggaattgcatacaaataaagagaagatattgaatcagtcaaaacacagagactaaacttttttatttttttacgcaaacacccctagacatgcgcccatgtcaaggaatgtcgtgataaggcacgggagcggcgtcatgggtgatcttgtggggcgatttaggcgggggaagttacaactaaaatggccacatttgaacactaggtgaatccagtaaatgcataggggttaattggccgatccattgacgaaacgaaattccagcagtttcagcatcaaaaacagccttgtcgctaggttcaatcgagtcatctgtgctttgaatagagatctcatggctgcggtcggcgatatttgccatggagaatctctgtagcgatagattttctccaaagaaatccctcatgatccacggagggtatgtagggggttgaagggatgtaagtttgtccggatggcagttgtccggctggttgagtataatacggagttgaggttggagtgtagtctgttgaggttggtgtgtaggctgttgaacttggattgtagtacactgaggtcgggatgtagcctattggacttggagtgaaggctcttggagtccgagtgtgggttgtttagattggatcatagatatttgtgattgtagaaatagggactggaggtgaacgaagcctggctggggttatacaataacaaattgatggataatctgggaacaatgatggtgaggtatcttccatgatcacctcaaaaatcgtgaaaataccaagggttcctttgactttgaggagcaatgatttcaaatgcttggagttgatgcaagtctgatggagatggagctctttgagccgattgaattcgatttcgctagacagctcttcaagagaatagtcttgcgagagcgcaagtctttctaggtggggagcaacatggataagcagagtgatctaggttgtactcatgacataagctggctttatgattctgaaagctatgcaaacgtagaggtcctctaaatcacccagaacggattgaacagagctgtattgctcttctgtggggaggatttcgggggcaattttaccacagcaatcaggattacatgtctgtaactttgtgattttccgattggttccactgagcgtctgcaaaagccttgacgaggctaaagagataatcttgtccattacgcttccgctaccatgaagcggctcgaggttcttactgccgaatcggaagtcgacttgattaaagaggcggcgccagccaagaaatcggactttttcttgtcgcgggtcgagcaaaaagctcgtcgtgtaatgtgcaagtccaaccgtgtgaaggttgtcgaacctttccaagcatttacgtagccgagtgctaaaggcctccaattctagaagactagaattgtctgtaatcaagactttatacgttgaaaaacgagcctttagttcgtcattgaataccgagcgacaactcttcgatgacacggcgaattcggaaatagaactttcactttctgcatgggagccatcgaacacggatggaatcatcgacaactcttgaaatcattctcaaataccatctgtttcggcgagtgcttctagttctttaaggctatcgcttgtcgcaatgaagcaaatgctcttgagatattgaatggaaaatccttcgagggatattctgtgaagtgcgcgacatgagaatctaagcgctcgccatttagagagctgtagaaagctacagactgtcgacataacttttactatgtgttttggggtgcgcagctcgtttaccgaatacgttataggcctccgtacgaggggaagtaatgactaccggttccctaaaattatgagaacggggaaatttagccaagctgaaaattagcgcagtgccaaatccacacaactcaaattttacccttcttttgaagcgaatgtggtgttagttacaacgaacggattagactgataagtacaatgaaggcaaagtgctcaaaggtgtcccaaacaagtgtagtttggtcatcaaagatggtcagtatgccacttttatcatcattggcattaagcaaatcactgatgggtaatagaagcataggaaggaagttgacagaatggcaaaccatagcagcaaggtaacaacaactcaattcttggtattgaagggccaatgggattgccaggatgaaattcatacaccggacataggaacttcgagtacgaagaacttgggaagggttttgaggatatggaggtatgcatttatttttcttcggggctctctttgtttcaccacaaaggacggattcttgataagggaaggctcggatataaatgaacgtccagtgtgggaatggaagggacaaagggctgggagagctgagctagaaagatggaatgatcttagcaaatgtaattcagtaatatgaaatggggttcaaataggaaagttgcaatcaaatgtaggctcagatatgagggttttcttttcttcagtcctcggctttttcttttttctttttggctgacaagaacagatactacacataagccgaggtgtaggtgtaaacccttttcatcatcgccaaatgaaaacaatggaacatagaaatggacttacaattccattagcaagtgctattttagaaatgagtaggtatatcgagtggcgagatagcaatagcggatctgtaaaggcagccacaatattagtaaaattcattcggtaattgaaacgttcaattaggaaggcttctatcaaataagtgtaggctcagaaatcggggttttttcttcagtcttcgactttttccccttttttttggctgaaaagaacagatactacacataagtcgaggtgtaggtataacccttttcatcatcgccaaatgaaagccacggaacatagaaatggacttacaattccatcggcaggtgccgtttcagaaacgcgcaggtagagaatggcggatctgcgaagaaaatattagtaaaattcgattcaggaatcaaataggcgttcaagtaggaagttttccatcaaatataggctcagataggtattttctttcttcattcctcggcttcttctttttttttttttttgctgaaaagaacagatactacacataagccgaggtgtatgtacaacccttttcatcatcgccgaattgagagctggagagtgtagaaatggactcacaattccatcggcaggtgccgtttcagaaacgagtaggtatatcaagtatcgagatcacaatagcggacctgtaaaggaagcaacaatgttaacaaaattcatccagtaattgaatagacgtccaagtaggaattttttcatcaaatgtaggctcagataggtattttctttcttcattcctcggtatttttttttttggctgataagaacagatactacacataagccgaggtgtaggtataacccttttcatcatcgccaatttgagaaatagggtgaagaaatagacttacaatcccatcggaaaatgctgtttcagaaacgagcaggtatatcgagtatggaaatgacaacgggggctctgctaagaaagcaaaaaagtccaaactggtaggtcagaagctgatccaaggcacgagaacagctattggccgtcatcactgttatattgacggtcaccaagggcaggagactagaagaaacaatctcattagcagatgaaaaatcatgattttgtgaatcaggcaatgggtttcaaacggtgcctcagatatagcagtgagttcatcagacatcagcgcacagaaaaagttttgaatatcatcattgcgccaccgaaagaatatgaaacccatgactaaggcaagaggcaagaaggataatgtgagttgggagggggtgcatacacatagatggagttgggtcaaagcaggtaacttgtaggcactagtcaaatgagatatgagtaaaatataagtcacatagcatctgagggaaaaggcaatgataactgtgtcatcttatttcatcgtcatcatcatcatcattgaaccgagagagagtggacatgaagccatggaaacacgtatcaatcggcgcaacaatagaatgctgtgatggagaggatgtagggggtagcaggagaaaacgtaccaagaacaaggtgatggaaacacaattaatagtcaagaaacacaaagacaaaagcaaccttggagaaacttgcgaacgagtaagcaaggacgtcgacgacgaagcgaggtaaacaagtcacctaggcagcgaggtcattgacacacgaagcaagagatcttgagactcaccaaggtacaccctgcaatggtgtagtgtaaacaagagattacgtgcattggggtcagaaggtcaagtccaagtcatgatgcaatgagaaagagtacaaggatggagtctctgaatttggatgcaataagagagacagagagtggtgtaggaggaaagaaagaaacaagacagaaaaattgagttgaacaatttatactcgtactcaatgctgattggcggtgggcaggaggttctgcctccgatcggacgctgattggttggatttagtgagtctatggtatatgtacacattgctcggatgtgatagatgctgtgaggtgacaggtttaaccctactcgcattaacatagatattggcaccaaacttggtgaacttgtagctaggatagtagtctatatttgtacaaactttcacattgtgaatcgatgcagtgcgcgagataaagctagctacaatttgctcgagcatcggggtttccgggccaggtacctagatctattccaactgctttggcattaccgctttgcgctaccgcctcatcattgcggcgattgactccaagtaatccaaatctcagcaaaagaaggaagcattgcccacgacaacatgaggagtccaaaaggaaacggacaactaggcaaaacgactaccgacgagcaaaatagccatcgacaactaagcgaaggaatacggactcaagccaataggccaatatctcaggaaccgtgggcaagacaagacgacaattcattccctatggtaacggcaagcgaattgctttcgacaaggggttgaaaacactatacatatgtccagcagtcctcgacaatcaacatggatccccgggtcgtttacaacggagggctaatttttcgatgaaagtctcgccccatttcgcactgcccaaagttagcaactgacaataggaaagcaggaaagtccttcgaaccttgtgttggtattgataaagtctcgaagatactcgtacttgctccttcgttcggccgggtccagattcaacgcattgaagatcgcctcggacatttccgtcttgtttgcaggatggaacgggatactaccctttgtcatgaaggtagccgcgccagcaaattcggagagaacgaggacaccgtgacgctcttgctggcatgccacatactcgaaggccacgagattcattccgtcgcgggtagaggtgagaaggcaaacatcggctactgagtacaacgcggtcaattcgtcgaatggaacggagcgatgcatatacagcagcggagtgccctcgggtgtggctggctagttagtacaatcccaacatttgtggcaaggtcttaccatgtttcccgttgatcttcccggcgatagtagacagttcggtttcgagctcctgatattctttcacttcctcgcggcttggaacggcaacttggataagaacgaccttgttttgcagttctggatgatcatcgagaaaagcgtcgaatcctttcaatttttgcgtgaggcctttaatgtggtccagtcggtcgacgccaacaattaccttgacgcctttatagcgttctttcaagtttcgaatgcgctcttgaacctcgggctttttcagggtgtcggtgaacttttcgggatcgatgccgacaatgaacttgtttacacagactagccgatttttgtactgaatttggttgggaatttcggtgcgagcgttgctgtggtggtgttagttgatacttcataagcttgtggagtaagggaattagggctattgctcacaggagactagcacaggtgtcgatgaaattttgtttatattcgtccgtgtggaatccaatcaggtcactggacagcatgccttcgatgagatgctttcgaacagggagattcctccaaaagtctcctgctggaaagggcgtgtggagtgagaagccaatggcacaggttttaccttgccgtttgagtcgatcacggagaagctcgggcagaagcatgagatgataatcatggacccagatcaatgtcccagtatccgctgtctcagcaatcgcatctgcgaataactcgtttacccgcctatatgcttgccacggagtttcgtcgaaaactacacctgattgataatggagaattggccagaggatacgatctggcggtcagcgtggatcgcggtgttagggcacggagcttactcgagaacccgttatagtgctcatgggccagggtactatcgaggaatatgggaacggcattatgttctcccaaactctttttcacatcttcttgatcctttgggtctttaacttcgattcctggccagccaaaccattggaacttggtggacttggtcaacccagatagagaagtgacgaggccaccactcgaaatagaagattgaaaggcaccattaacacgtttcacagacaatggaagacgatttgagacgatgatgagttttcgcttttcgtcggtgattgaacccatcctgttacaacagctggaactttatgtatcttcaacaacaaagaacaagtgatgagtcacagacagaattcggccaaaatgatattcagctttgagttgaaagaagcagaaaccaaagaggaaatctggatttatacatcgccgcagaaatggcaaatggcaaattgcacctttacgtcagtatgaaagaaaatgcttccctctcctctttattatccatatgcctagatctaggccacattggcctcgattacattctacctcaaatattccatttgtctggaatcagctgatttaaaaatggttggttgacgatccttccgggttctatacaagcagagatataaaatcgacaccggtcaatccgctttacttgccacagaaattgtcaacatatagataccgtagcaattctccatctttaatcattagattaattatattgatctatttacaaatttccagagctgcttcttattgcaagatttcgtcatgggcatgtcagagctaacgcctcaaccttgttcagcgatttgcctcttttcgttcgatgaagcaattcagtacagatatatacgaacattcagcaaacacaatcactttgaagcaagttctcaagctagtggtcaaatctaaatccttacaactttgcctcttattattctttttgttgtcttgaagcattggctctctgaggagctccattctcaccagttttcatagcaaagtcccaggatttttggacggattttgcgctctgatccaaatgcgcttttgagcctattaggggttttgccgttctacacgttcggaaccctccgtgactggatggagcttggttgagatatatatagatctcaggcaggctaatctcaaccctttttgatatgttctcactcagctgcagggcgacaggaacgcagtcctataggtgctaggggccatatcccaatctttagttaataccgatgccttaatgagccgtctacttagggagaagatatatagaaaagatacctcaaaatatataagaatacatcttaaaaagactactatagagactaccgtcgagataactagatcgtgtcggttgaggctatttttgtaatagtacggagtaagtcaggtggtttaattcttctgctagtcataattcaggcgtctaggcctaaataacatattgaggcatcagtatttagtaaacacaggggttcggccccttgtgtctatatcactgtgtatgtaataccgttcggaggcgaaatatgagatttatactggcctaagtaaaaacaagtacctatgtagtacgtatatcagaggtagagacagcagagagaagccagtatagccccagaattaaatcaactagaaacaaatacaagaaaagaaaacaccataacgatggtatgaaataaaacaccagtgccgggccaaatgaaaatcccaacgaatatgatcccatccccgctggttatgctacaaacccatccgctgtaaaacaagtacgccgaccaagacccaggcccagaaatgagaacagtggcttaggtaaacctgcgcttagttgggctcggtgtccggaggtgctgctcacgctcacgagagcgctcggtgacaaagtccatcgcccgtgtgttttcgagcatcaggggctgatcgtatttctcgtcgtaagcaactccttgggtttgccgggggtcttgctgcccgtagtatccgaaggaggggttatgctgcagctgtgggtgcatggattggggtggtggtgggtgttgcgcgtagttctgttgctgaagacgttgtctcaatgagcggaatgaccagttgctaaaaacggtgacagtagatatggttgcgaggaagaacagctagtataaaagtcagtaaagatccaaaactgagcgcgcagggaaactcacaatcgccttccagctaatggggtcaatgaaactgttgatgataatagccattgtatgagcggagactttggcgcggccaacctttgctggatcacgattcatacaccgttcccagttctcgcatatagtctccagagccgggacgcgactcgatcgcccgcagtcgttgtcgatatagttttttgtgcagaccgccatgtcggccaagatagtatcagacatttcctgtgcagcttgctcgaactcgcctcgaatggccgacacaaatccgaaaaccacgtagacggccagagagaacagcgataggttgaccaccagttgggcccaccacgacaggatggcggggacattcgggtgtgcctccagcatgctgaagaactcagaccaggatgagactcgcgagcgatcctgttcgaatttctctcccttcccttgcttcgtggctttcaccggcttctcctccctgctgctgggccggtcttggtcgctatcgtcatcgctgtcgactcgtatttgccgacctagttccttgtctctccgtcgtttcttttgtatccggtgcaaggctgcgttggagtggtgggttagccgagggatttcgcctcgccctgggctctgcggattccggccatgaaagttgaatagtgacgaagttcccttccctgacttgtattgctgctcgggcgtgtcctcgttgtctgcatattccggtgacgacatattctcagcgccagatgaaaaatccacatcaaatttccgtggtgtctggaaagcaggttggccgaatttagccttgggtgatagtggtgcgggttgttgtcggggctgtgaaaagaggaagggttgagagtttggttcgcggagcgagggtaacgcttgcttctggggcgattcgaatgcgctgtatgttcctgtaggagtgtcaggggcttgtaattgcagttgtcgtcgttcagaccgggatacgaacgtttcttgtcatgctgcgctccaagctggtagaagggtgaggtcacgtcgccgggggctcgagtttgccactcaaagtccattggactctctcccgttcgtttgtccatctttgtttctcgctgaatatagatccgtagcgggtggatggtgagtgtcaaaagtcgggaagttttttgtttggggtaaacatccagatcccgtagcaaccttggcatcgacactctttatctccgacaaggaccgtacttcatcttcttcgcacatatctttgctttgttttgtggtgtatatacagctttaggaaagagattttaagcagtcgtgcttgagcagacctaatcgaaacattgacatcggcccgtggaatggaccacagatctagagatctacaacgttgatattacaaatgtatagacaagactcaaatccaacatcgaagcaagtatgatcatttgacgcatcgggcgaccagcacccactatgggtattaaacaagatggaaagcatacaagacagacatgagaagccatctactcatccatctgccactggtattccaaagcctcaaaccgactcttcttgttccgcgacgtaaaccagtctttctcaaatccattgccacgatccacgccatcccagcggtgccctggccggatcccatatcgattaggctggaatgagccctgataaagcggccgccccgtaacactggctcccgcatcacgccgggcagtaaggaactccgcagcgggatcattccaccgatcgcgggccctcatatcttcgttcagttcctcgtcctcgatcgtccgtgcaagtggcatggccttgatatcttgtaagttctgtcgtcgctcctcgcgctgctgtcgctgcacatctcccatcagcgcctcgcgcgcctgttcttctttctcgcgcttttcttcttctgcgcgtcgggcttcggcgcgtttcatggccacgttgatgattcggccggatgcgtctcggtagattgtttcttggcttttttgattcactgctgagggatcgcggtactgtgcttcttcggccttgcgccgcttttcttgggctttcaccattgctgcggtttgggcggcggtttggagaccccctcgtactccggactccatgcgccctgcgccgtcgtcttcattttctatcataagcgcatcttcgtcgtcggggtcttggtgggcggcgcgttcagctgctgcatcggctagaattgcgtcggcggcttcttgttcacttccttggccggacgtgggtcctccgattgtcttccagcttgacttctttgcgcggcggaattctgtggttctggcggatgtgtcgaaataaggtctatcctcatcgtcttcttccgtatttcctaatgagcgaatgtctggtggatcatcatcggcaatgatgagaccagagcctgcagtatcgatggctttggtcttcttgcgcttcttctttggccgctcggtggtagggtcagcggtcagatagttctttgccaggtagtcggcgagtgagccaggcataatttcggtatgctgtatgtgaggaatgtgaaatgtagaggtgcaggttgagctcagtgatttaatgatccggaggaacgtttccccgaactgtatgccgcctagcgctaagttaacaaggcgtgaacgtcatttgattatggactcggcaatgcagagtgagacttcgaacttgctcgctgaactaattgagaggcctgtacaatgccacgctccgaagaagcagagtggtgggccaacgcagtctacgaagccatcaaagagattccccggggcaaagtcacttcctacggtcatatcgcacgcctcctcggtgaacgtatggatgcaattatatgcttgttggatatatactaaccatttttctttggtaatagctcagcgcccccgccaggtcggagtctgtctcaaggtgcttccgtcaccggagtctggctcgtatttcaactcgaacactgtgccgtggcagcgagtgattaattctaaaggaatgatttcgcatcggtgcgtttgttctaggctacctattccgaattcttatatcatatcaaactggaccatataatctagacttgaaacgaacttttatacgtgttcacggctgacatctataacagtggacccgggagtgcggagcgtcaggcagaagctctcgcacaagaaggtgtggaggttactacagacagcatgggcgagatgtatgttgatttttctcggtatggatggtttccaagcgagctgtcgagcgagggaacggatgagcagccagagaataacaccccataaagactctcgaaaatcctcatacattggggttttagtgcccttgcgttgcatccgagcgttaacaatgattcaaaaattttacggagattgaatccatacatagcaaatagtcataacttgtctgtctggagcaaatctagaaggacttcccagacgagtgggaagtgggaagggatgatacaggagactaaagacccatcacgaatatgatcaatggaaatagaaagacgagtctatcggggagatatgagatcgaaaagcaccagacacaaaaggttgacagacgtgcagggggaaaggcgaggcataagcatacgagcatctcgaataacaccccatccaaccaactaccagcataggacgaaagaaaagctttgaagaagaacaaagacataaaccaaccagcatcaatccgtaaatggaaagagaaaaaagatcgttaactcacatcatcgccataagggcatgaaaacccaggggatagtcccatctaggctaaggaaagagaacaaagagggaggggatcactaaggtcatcttcatcgctttttgacctcagcagcccagccttcaataccctccccacgagttccagggacaatgcccagatcgatcccatccataccaggcgtgtcctttatccactcatgagctgccataccaccagcgttcgccctcttctccggtgacagatcaagcatgggcaataggagttcgctaatacgcatgctctcctccatggagtagtggtacttttctcgcaggacgtcgggcagggcccagtgacgaagtcggtggatattgcgcagttcacccttgcgattgaaaatttcttgggaccatttgccggacatgcagagtgacttggggaagggacccagtagttcaatgatttgggcgatgtgatcatcgtccttgccatatttggtccctgattgggggtcgaagaggtagtctccagtgatgagttcgaaaacctagacaattagcatgttgttcggcttcggctgtgattgatgatcatgccactcaccatgcatgccatactccacacgtcggtactggcaccccacttagagcccagtatgacttcgggcgagcggtattgacgagtctgaatgtcgttggtgaaatgatgaccgacccaacaagcattgcctaagtctgcaatcttgacagaaataatattgacgtcaagttcttcttccggtgatttgctcgaagagcctttatcgagggaaatgccagacacctcgcgctccagaagatctctgtatgtatattgttagattagatcaagctcttatcaatcagagcaaggcagatgtatgtcatgacgtacgcagttttctctcgctggttctgctgcacatcttcttccttcaccccaagcagttctctcatggagggcgtttctgctgtagatgctaggtcagtttcttttctcgcgcgcggtcgagccatgggtgcatcaagggggactgacctgcaggctcattgaccatctggctgaggctactgtgtgagttggaagagctatgtttgaagtcgaagttattgaagttggtgttgagcggactagggagcggctggctccctgtgatcagtgtgcgtcgccgtctccgcccgttccggttatcctctttctctttggcatctttattggcttcttccttgacatgcgccttgacgatctgctccacatctccaatctcgatcaggacattctccggcttcagatccgtgtggatgattccacactcgcggtggagatagtccaagcccagcagtacttgctttgcaatctgcttgactagcggcatgggaataccgcgatggttccaccgcttgatcaaacccaagaggttctcgcccaggacttcaaaaaccatacaaacatggataccgttgggtcccttgtgttcaaacgagtccagcagactgaccacatgcttccgaccagggtgagagggtttcgcttgaactattttgttgaggagcttgatttcgtcgatcgcggtttcggtgtagtgtgcggcggatcgaaccaccttcagcgcgacatgcttgttggtggttgtgtcccgcgacagccagaccgtcgaaaaatgaccccatccaagcttgcgcacgataatatagcgaccattgttgtatgcttcgcccacagcgacggggtggtatccgcctttgcaataatcttcggagtcctcctcttccgcggtagcctcgagttcttcgccagacgatgaggatgatgatcgcgatgcggatgctttggagtttgactgagcagcgccggttctgatccatgggagattagtaaccctgttcatcagaaatgtttcaagacatacgattctgtagcaccgggcccagggttcgcttcattagtgacgatgggcttcaagtcggtgccctttctcctcttctttccgccgttgccattggcagctgacgcagcaacgtttgccatctgtttgcccttgttgagcatcgccttggtaagatcgactccctccatgatgtggagatttgggaggtcaagctgagaggcggggcacactggcttttggttggttcaagcggaacttagaggcggtggatgttggaggggggggcgcctctaccacctgcacacacagtaaagacacggtaatcaaatattgcagaggaaaagttcaaataaactgggtaggaataatttgaggaggggaaagaagatgtcaaagattggaaaattgcgggtaaaggcaaaggccaaagagaatatgggccagagcgacgatccgatcgcaaaagtcaagttttataagatcaagagaaagatagatcacttcggagaaaaggggagtgttgagatcgatgggatggtattccgcaagcagccacagcgtcgtggtggcaaatatggacgcattgagtatagacaataaatagccttataagaatatcctggatgcatgtaaatgtgaagaaaagagaagtctcagcgctaatgctttgactagtagaaacatagcaagtagcaagtacagcatacgcgtacatgtcagaggagatacattctgtgatgctgactttgttcacttggttatatactgtagatgttttaggtctttcctgctacatccaccttactctacctatcctatccttgactacattcttattcattattctattgaatttcaatcagatagaaagaaaaaaagaaaaaagaaaaagaaaagatcgactgcagtcttgatgtgacgatccccgcttggggtaactagctacctgacttgacctcggtggattcacctcttgaactcttactactctgagccgttcctttggcttctctgtcaccatgacaagtcccttcaaccgccgccctattcacgactacttcatcgcctctcctctggtggccctactctatccagtacaccagatattgctccgtctgcgtggccctcctcgactccctccgcctggcactcaaccaatccgagtagtctgcatttccgatactcacaccctcgaatggccagacgtacctgacggagaccttctcatccacgccggagacctctgcaacaacggttccgcacgcgatatccaagcctctgttgactggctccggagccttccccacccatacaaaatcgtcatcggagggaaccatgacagctacttcgacgtgcggtcacgtctggatgaggatcgtaaagacccagcttccatgggggattccttcgcggcaatctcttcctcgacggcatccattcgctcgttccacgagctgaacgacgactcccgcatcgactggggtgacatacactacctccaacactcagccgtgaccctctcgttcgccgacacctctgcgccctcgcccaccgcccccagtactagctcccgctcgcgctctctcacaatctacggcgccccccaagtcccagccatcgtccccttcggccccgaacacgccttcacataccccccacaccacgacgcctggtccggcaccatccccccagagacagacatcctcgtcacccacaccccaccccaatctcatctcgacctttcccccatattttccaccggctgtcccaacctgctggcggaatcatggcgtgtccgtcctgccctccacgtcttcggtcacgtccatgaatctgccggccaggaacctatcttctgggatgaggcccaacgcgcctgggaaagattgtgtgcctcgcgccgctcgcgtgcacgctttagccgcatgtcttcgctcgctggcttcctccgcgatctcttcgatctatctgcctgggtggatgccgcgcgggtcgtgggatacgggatctcaggtgtggtttgggctcacatctggggtggggagaaccttcatggtgggtggatggtcaacgctgcttgcatgtatcgtgacagtggccggctaggtaacccgccgagggttttttccctgtgatcttccatcggtaagcatagcgttcgctttttggttcctgttcataataccatgttggttggcttgcgcttggtgaactgccactgtaaataaagctgagcggtttacctacgccacaaaaggcgtctcttttcggctattcgcatcttcagcctgagcaactccaaggttggttctcaagatccaccttgtatttcacgttacaaaaatgataattgtataatatatatattggcggttctgatcttggtagcaatagtaacctagttcatgggatcaacagaacctcattgagcttctagttaatgtcagaggggcaatcatagtataaaggcatatatgtattcaaaaaggtatacataccctatatatacggaaaggaagaaaagaaagcaataaatcaaaggcaaatgtagatgtagatggaaatatacgtctccggtttttcaggtgatactgaggctccttctacaaagtaagaaaccttgaattcccacgtgttggtatgtcaacttcaaaatatatctccgtagtcttggcatcaatcatttaagttctacaagccaaagagatatttgaccaaaaagaataatttgtacatattgcatgggtatagagatatatatggactcaatggttatatgcccagacgataccaccctgtagaccgacgcgaacaactcagcaagcttcaacacaaacaaaaatgaactacaatgcagcaaagaggattacagcttcggcttctcattaaacctcggcacctgcaatggatcatatgcactaaggccaagggtatcagacggcacaaccccggagtgcccacccaacaacccgcgagtatcaagcagactaggactgagatccgccacagtcggagctccaatcaaccgcatgttcatctccatctcatccttcagcagctgcatagcacggttcacaccatcaagcccataagcagacatggcatacaggaacggccgcccaataccaatacccctcgcgcctagacaaagcgctttaaggatatcagttgcgcgacgcacaccgccgtcaacatagacttcaatgcgattttcccagccacgctcgcggagcgcaggcatcacctcggccaaaacctcgatgccggaccgcgcggtctcgagctgtcggccgccgtggttggagagcacgacgccgtcgcagcctgcctcgacggcgcgcaggacgtcctcaacacactgcacgcccttcagcacgatcggcatgcgtgtgatggatttgaaccaggggatatccttccaggagagcccggggtcgatgaaggaggagatggcgcgggcggcgccctgggtgcggtcgatgtcatcgccgccggactggacgttcgagccaggatcggagaatttagaacgcatatctttctcgcggcggccgagttggggcgcgtcgacggtgatgaagaggcccttgcagccgcgctcctcggcatgctcgacaatcttgcgcgtgatttcgcggtctttgttgacgtatagctggagccattgcacttggtcgccttgtttggcgtcaatgatttcgtccaaggagcatgaggctagcgtgggaatcatttgtactacgttgtgttcgtgggcggcttttgtgagcaccacttcgccttctgggtggcccagcttgccgagcgccgtggcagtcacgtagaatgggattgagcattttgtgcccagcattgttgtggtcatgtcgatgtgctcgacatcgactagaattcgcggcctgaaccagattttgtggaaggctgcatggttctcgcgcattgtctggttataggttagcactggggatttcgtgcctgggggtataaatcatcatggtagcttacaatttcatcatctgctccgctagagtagtatgcccacgccgtcttcttcataacttggcgggccaccacctcaaagtccagcaggttgtagcaagcctcgagatggggcatgcgggaaatgcgctcttggcgttcggcttcctccgggtcgaaggctttttcttcctgctcaacggttgccatgtctactgctcccaagtgcttcgacgggtccaggaacttgtccagggtatcgggtgggtggattggttcgaactcttcggtcgcatctttgcctgcatacttgaggatgatcttctggccaccagggtgttctgagaaatattagtacacattcgaggagggaaacgtagtaaagaaacacacacccgggaggaattcggttacgtcgtaggctttgccgtgcacaatgatccagcacgagtctttggagttgtgctcggcgacaacggcgccggtgagcttgcctgcgctcatattgaaaaggataagagagtatattgttcgctgaagagtagaagagaggaagtaatgaaagggaaaaagatctagtggaccctcgggataaatgagtccgggggagaaattgcggggagcctctcggccgacttgtcggatgagactcgcctcgtcggatgagaactcaaatgctccttaggtccgtatattaatcgaattgaatgtacggagtattcctaagatcaagcccaaaatccaaaggatctaagggattggtgggggatcgttgtcggagcctcggtctgggtcatttcctctatattggattcagccagtagtacggaacgtattacatgctcggatgttcccttcacaaacagtatttcccaatgctgtttttgttgtgctatacatgctgcattcagaaaagaaacaaccttacctatagattcgctgttgacagccctacattcccttgttggaatgttggggtcggggaaagaatagttcatggcctgaggcagcaggactcacatgactcaatcacatgactcgtcacgtgacttccatcatcagaatacaaaatgtgtatcataatgccattgtgttgaagtgcagtttttaaggcttttatcatcatcataagcttaattcaacgggtaatgtacgctgacaattggacagcaacgttcagattataaatagtggagatcattggacggacgaacagcgagcctatgtacctcggtcttggctgatagcgccaccgtcgatcagctactaagcttctttaaaacctggtttctagcttgaagttcaaagagactacctacaatcaatatacggagtaacgctggtcaagtttgcaacgcgcgtgaggcgcacatatcaatttgtgatctgcatcggtgcagatccataatcgggcaagttcggtcattcctcgcacctccggatatcctccaccctcccacacctccgccatttctccatcttcggctacagtgggtggccacagcccctccttgctgcgtcgcggatgccactgctgacgttgtacggggaaggggctccgcctagtgcactgtccacgagttgtaccatgtgtatgtggcgcataatcgttcaattcgtccatgtatatcgaattgggctaaagcggtcgccaccaatgcttgtagttcaatcgaacggtatagtactgtaggaatcatataaatgaatatttggatcacctagctgaaaaataacatggcaataataaagatcaaccaaccacggaggattcatctactggtcggcttcgccgacagcatatcagaggcgctgaaatcacgactcaagacccccaatgaagcgggtctataatgtgctccgttcctatggatatgcactgtgatatcggattttcatacccaatcaacctcttatcggttgaggtctgttgaggagtcttgatggactgcgatgtaagctaaagatggatctacaaagagtacaagatggggattagccccttcttgaattgtggcgtgaacacgcggacctgccatggagaggcatattctctactatcgtacgcttcaacggtcaagagttttgcattcacgtgcgggaacataaggaaccatcaacgccttatcttcattttctggttgcctttctttttcgtccgtatccacttagttgcagttcgagaaaacttcgaatacgctaggaagtggttcaacgacatcattgcggatactagacgatacttttccgccgaaggcatgcacggagtactctttgagggggattgatggattatcccccatcttttaaagacatgactcgagtcgtcatttgaatggttggaaaaaaaatgaaaagatttataagttttcatacaattcatgtgtcatcgttttacttcaagtggaaaagaggcaacattcaagggaggaaaaaaagccgttgctcacatgattctgcaaactgtatgactccacatgttgttttcggatccgagtagaaaattgtataatatgttcagccttatattgtattacttgtagccaagataggaatcccgaaagaacggagaatgaaaagcattggatagaatattaaacgatctcaataatcaatcctattctgtagagcaaggaggatggcttgtgcacattctatatcaagtaaacaaatatgtcaatccctgtccgatccttttagtgcggcgctagtcctttcgcggcccccgataacatttctttccgacctccttcgggatggggacggcttcccgattcccgatttgcaaccggcgccgataacacttggactccgagtcgcatttgagatcgagtacaacgtctaggtacactgttatttggtagggaccttagcaagcgcacatagcatattcccttgtgcgcaatttggtatcggcaaagccgtcaaccaatttaagcctatggttggtagggcctgtcattcaccttaccgctccaggtacagtccatttgaacatgacgcagaattcatgtatgtcagtctacgggcccaagcatcataccgaagaatatatccacccttctcggaacaccaatcacgttgagaaacattaccgtcgaaaaaataagacaaaaagaaaagaaatagtcaatctgatgtcatcagggacgcaagctacgaagtggatcctaaaagaatgcttaacacgccattagtgatgcattcggcaaataggctccgctctctaacagctctgattcgtcgaaccacatttcctacggtagtggcttttgatattttgctttattttattttcttttctccccaaaggtctcggactcaactcgtatggagtagacacgggggagaaaaaaaaatattatatgccccacgatgaatttccttgccacttttgtcaaactccattgaagaagcagacattcaaatatctcccggtttcctccaggatttactcatttctccacgtatctctatatctccagctattccactcactccactcatacccacgtgtttacactgggaactagtccttcatcacttggacctgggtattaagctatactgttattttctctttctattcttcatcatggcgccgagctatgccggcatgtccggtaagcctctgagtttgacggtgtcgaccatcgctactatgggcttcctgcttttcggttacgatcgtgagtatacattgacttctgatacgaattcaacgttgctaacagtctacagagggtgtcatgtccggcattattgattgcgatgccttcggcaggttcatgcctatcacccggggcgactccaccatgcaggccttggtgactgctgtctacgagttgggctgtctggctggtgccatgtatgccttgttcgctggtgacaagtttggccgtcgtctcatggttatccaaggtggttatatcatgatcattggtgttatcattcaaatctgtgctatcaagggccatggagctactgcccagttctttgtcggccgtatcgtcactggcattggcaacggaataaatacttcgactatcccgacctaccaagccgagtgctcgcattccgccaaccgtggtcttctcatctgtattgagggtggtatcatcgctgttggtacaatgatcgcctactggattgactttggtgcctcctacggcccggatgacctcgtctggcgtttccctattggcttccagattttcttcggtattatcattgtcgttggcatgtactatatgcccgagtcacctcgctacctcatttccaagggcaaaatacaggagggtgagtatgtgctcgctgctctcaatggtcacgaaatcgaatcccacgagacccagatccagaagaagctcgttatcgagtccattgaagctgccggtgttgctgccggtgctggttactccgatctcctcactggtggtaagacccagcacctgcgccgtatgcttatcggttcttcgtgtcaaatcgcccaacagctatctggttgcaatgctgtgatttactacctacctgtcctcttgaagaagtccctcggccagactgagttcatgtccatgcttatcggtggtattaatatgatcgtctacgccatcttcgccacgttctcctggttcttcatcgagaggattggtcgccgcaagctcttcatcggcggtatgacaggtcagatggtttctatgatcatcgtcttcgcttgtttgatccccgaccagaccgaagcttccaaaggtgctgtctttggtctgttcctctatatgtccttcttcggtgcctcgattctgcccctcccctggttgtaccccgccgagatctcgcctctccgtacccgtaccaaggccaatgctgtctcgacctgctcaaactggctgttcaacttcactgttgttatgatcaccccggttatgcttgagcgtatttcctggggtacctacctgttctttgccgtaatgaacttcatcttcatcccccccatgattctcttctaccccgagacagctggccgcagtctggaggagattgatctcatctttgccaagggttactgcgagaacatgagctatgtcaaggctgccaaacagctgcctaagctcaccaatgaggagattgaggccaaggctgctgagtatggctttgagtctgaccgccgccgcggcgataccgagaatggcggcgaaaagggctcccctcgaagcacctccagcgatggcaagcaacttttcgaggaggaagagaacgccactaccatctcttgagagctaggctttctgtcaactccgctaagcggttatgtttcaagtttccggcatgacagcgctgtgcgctgacacctatcaacgttatggctgtgctgttccctctgtccaatggacgggtgaacgccagattcgcgttttgcttttatttcttatttctttacatcttataccccttgtttctggtctcttgggtgatcctgtctgcactttgagtgcagtattgctttttgataatgacccccgaaaatggttcggtcgggcatgggaattgttcagcttcatgtacatgcatgggcttttgcatgatactagtctagcggacgaacacatcacatttactcttttcccatgtaaattgtaaaacctgtatcccatggccctgcatatgacaccttgtagcctgccgctctagggttgagtttatagtgactcatgcgggtgctgccttgcatgaggctgatagaccccagagcaaggggaccattcatattccttgcaattaaaaaactataatgacgagtataatctcctcggaaaagagagccaatcaataagccatgcgaaatacatcctgttatagaacccgatgcagccctttatccgcctgtaaatgtcttaaatcccatgttaccaaccactgcatgtaagataaagtagttgagttgatagaagctgactcttttttgcctttctattttttgcctattcttctatccaagacacgtgcaggtgacctcgtgaacaagagagaagccatcggctgataccgcccccaacttttcttttctttcttttcacattcaaatatctctttgatctgatcgctttctttcgtgttgtggtcaaagaatttgacttctgccaacatataatgcgaatacaaaactttgacccccgcttcctcaacctcggggaaacatgagttcaagcctcgaagctaagatcgttgtgctcggcgcacagggtatgttggctgtgaattacccagttctaaatctcataatcactttactaaccttatctcaactaggagttggaaagactgccctcgtggacaggtactgtaaaaacacattcaaccccgccgcggcttcaaccatcggcgcgtcgttcgtgacgaagcgcgtcctcgattccacctccgacacaatagtcagattacagatatgggacacagctggacaggagaggtttcgcagcatgtcgagactttattatagaggagctcaagcagtgctcctgtgctatgatgtcagtgcatccacttccacaccgtttcccctcttcattcatcctgcgattgtatttgttgcctatacataggcaacctacaacgtgatacaacccacataaacatgaatactaacttgcacagatcaccgaccaaaacagcttccaagaaatggccggctggctgcgcgaactccgcaagaacatcacacccaacgacgatggcacagactccctcataatacatgtcgtaggtacaaagtctgaccttgtcgcggacgacccctcctcccgccgcgttcccttcgaacgcacaatcgcctacgtcgctgaacaactctacccatcccaagcctccaccccgccaccaaccgcaacagcaggcatgggcgggctaggctttggaacatctgtttttggaggcagtggctgcagtacatcgaacgctagtgccggccctgcagcacactcgtccactgccctgcagagtccggactcgaaacgcagttcagcattctggggacaggagattgggtgggattgctgtcatgagatcagtgcacgggatggcgagggaattgatgaggttttccgcgttatcacgcgtaagctggttgagcagcgcaaccggcgggatactgagctggctttgtcgattgctggtacgcccttggcgaatggggtcgttgggccctttaatcctggggttgtggagggcacgggcagtttccgccttggtcatggtgataagcggaggagttggatggggttggcacctggtgtcaatgtcgagggcgccggcgaggagcgcgttatgcatgcatcgcgcaacaaggggcgatgttgttgatcattggctaggatggggggttggattgctttttctttttgcatttgagccagcgtcgttttgtgtttgattattcatggatgcatgggttagaatagtgtagttagggcttggattggttgggtggccttgtttttttgtccgctatgcgtgaatgaagatacttttcgtttggtcaataagaaacgatattctacgccacatgcactcatcatgtactttttatatcacttgaatctcgaagcatgggcagtggagacggtggatccgatcgagatgtcccactgagtccactatgtttatctttttataactatgttgtatggacatcctctggcggatgtttctaccatatcaccaatagccaacaagatcatacagttcaatacggcgataaaccggatttgggctcacttacgtcgaaccccctcatctcgcttatatcggagaatttcctctgccattggtcaaagtatcatggggccaatcaaagagagactgtgctttgctatcagaaagaacctgtcgatttcattccagtccatgtctgtgtcacatcttggccaaggaagtatctcttttgtcaactgcatccctttgctgggcatttctggtctcctttcttattccctccaagctttttgttgaatatcaaaaggtcgatctatctctttatcacattcatcttgttccaaagcagacccggtgctcgtattcaacccctcagccccgtatatcctgaatcccacctcatttatcatgtcgggggtggaggtgatcgcggtcgtagcttgtgtggcagccagtaagaccatctcctctcctatcacaataaacgagattaacaagcctgatcggcaaacagtcgtctccgcctacagcgatggagcgattatgtttactgccataaagaagaaataccgcgagcgcaaatccactcagaaactagaacgctcgctcgaaaggtcgctcgaacggtcgctcgaacgcggccatgctgatattaaatctcagttcaaccagtaccgtcaagagcttggctggcgatatgaggaaggtgacgcgatcgcccgagagcagatgaaagatatcatcatcgaactacagggggcgttgctgaggcatctccgcgaggtacaggaccgggggaccactctagatctcatggcgttgcagacagagtccgaccggggccgcattaatactttgcttattttgagccgtttataccagcggctctcgaggccgtcgcctgttccgccgtcttttccgctgcccatcgacccgacctatcgtataatggcttctcatggccatgaatatccccttcatggccaggacagatattcactatcccattcctcggagacggggtacatctccggctatcccgtctcaccagccagtcatttaccaggccagttcctaccggacgtcgtccccgcctccccgacggatacgctggggccatcgagggaatatgaggctatgaatctaggaaatcgcctacatccatcgggccttggatttgctgtgagtagtatgggcgacttgttccatccccgcccaggtcgtacatcgtcgttgccagtgtcatcgcccgagcccatgtacatcccacaacctgtgggatccaacccagagtcaccgtcgatgttggggcggattccgcaagttgatatcagaccagccacgccgcacagacccaaaccgcgaccaagttcgataccccacgatgtcttgtgggggaacccgtgggagcacgaaagcctcacagactcaaccccatcaaattcctccacccgaagcagcaccgacggatcaacccaggcaatccgacccctctggccacccagcgaaacgaacaactacctgggcttctgcaaaggggcgtggaaggtgcacgtgggattacgaggattcaaaatctactcggagcctgcggggtattacacacaacagtcatggttgcggtgcacaaagtgtgctttcgaagcacccatggccccgaagagttctagcagcaacccgcaattcgagaaaagcgtgcgtacacataaagccagcggtattcggtatcgattcgagttcttggcgaaatcccacgtgccctgtaagcgggacccggcatcagattttacccctaataccccccgcggcacgttttgttgcgtcttttgctgtgcgctggcacaaagctccacacgggtctatgggaaccttgatatcttcatggcgcatctggcggaacagcattggacggttgagaagggagcgttggctgttttgtctagtatgcggtgtgtggtaggtcgagttgcgcctgattcggagtatttcgatgtgaatattgtgccggtgcgcggctgatgtcttggatattattgatcctgttgttttattttggggatgtcttaggtttggactggaagggtgtcttggtcatacccgttctttttgtgtatgtgatgtatagcgtttgaagaatggatttcaggagtgtacatggatagcctgaccaggtacgaagtagtactcggtagatttccagggtctaagtaatctttcacggttgcacagtatgtatatcgtactccgtacccctgaatacgtaaataactcgaaaatcaaaaataaaaccaaaaggaaataaaataaaataaaataaactcaaaagataggccgagatctttcgatttcgccaatcagaacgaccccaatggcccaaaatggcccaaaatggatcaaaccaggaaccgacacagttcggtctgcccaaataaggaaagcgccaccttcccttttctgctttttccctttaccttttttttttcttaccaggtctcttggagaaaggacctcctcctctggattctaacttattcgactaattccatattccttctcgaagtactacttcatcccttgactcggcactttcgtcatctcgcgctcagagtacgcgagtgagtttgataggcctccacatgggtcgacgcttattacgttcctaagattgcgcgttccgacaccttggccttttgccatcttcctcctttcacattcaccccctataccacttccctcgatccccacaatcgcgttatgcgatgaggttgtcacttcgtgttagtgccgctgccgcactaattatcctgactctcgtcctggtctgtcgcaatctgaagaccaaaggcgaatcactccaggatatatggcacttcgataccggctccttccgtacatccctcagaccaaaaccccagcctgatccatcacaacggaaatggcgggttgcatcggacagaaaacccgcgttggtctaccagaccaccgatatcgtggtccccaaccagggtgctattgtgatggccaagcttaaggaggaagacaccgcttgggtcggggcagaactagcagagtgagtgtgactcgattgtattcccagaacaagaccctaactgaatatctccagatggcgcagcgtcatttacaccgtcgacgatatcaatgccccgacgcacaccccgaaaaacaagggtcgcgaggctctcccctacctcaaatatctggtcgaccactacgacgaccttccagacatcgtggtcttcctgcatagccaccgcgacggcctactcgccggctggcacatcgacaccatggattacagcaatgtggactcggtgcgggcattgcagaaagaattcgtgcaacaggcaggctatgtcaatctccgttgccaattgagcccaggatgcccctcggccatccaaccattccgtcaacccccgaatcccgaaagcaaaggcgaggcacactacgctgctgcgtggaaagagctgttccctggggaaccggttcccaaggaagtcgccggcccatgctgctctcagtttgcggtttcccgagagcagattctccagcgccctcatagcgattaccagcgcatgtatgactgggtgatgaacaacgaactgccggacgacgttaccgcggcaattatggagtactcatggcacatcattttcggcaaagatcctgtcttgtaagttatcctgcaattgtattatttgtattttccccgctaacacgtttaattgcagctgtcccgatttgttccaatgctacgcagatgtctacggcgaagaagtcatctttacctaaatactgctcatttctaatcattcttcttttgcctacaagggccgatagctctcttgtatttcaaccaatacgtttcttcattacccggcacttgccggaactccccagcggagaaataccatggttactgggaagacacagtgccaatgccatatgatgacttgcttcgatgtctattttttttattctatcggaagcaaatgtacaaagaccgaaatgtgccgggatggctatcagagtgatatcatctgtctcacctcgagttgcacgtccaactcaagcgcatgagataattcctttcgtgctacggcacccatgtatatcttattgatgcaaattttattccagttcaatcagtaaccgggtacctaccgcgtagctatgcctttttctcctgtacaaccatcttcctcgctacttcatcccaccggtacatccccccactaccgacattataatgataataattatttgtcccgctaggaacaacagcccgccgaaaggtaatgttaatccgtcccttggtcgcctccacggccttccccttccgcttaggaatactatgcaaccaattcgactgcgtcgttccacgcataacaaccatatcccctgacccaaggctcattttaatctgctgcagtggcaccgcagcagcaggcctagacccaggagaagagacggctttcaacgttccacccgaaaccgtacaactcgcccgcgtcgcactagtaccgcccggcccggaaattgcgtgtgcagcaataggcacgcatccacccgtcgtccggtttgcattccctgctggtactgaaggcttaggcttcattagaaaatcccgctcgccgcccagcgacagcgaggcgatatttgggtctggtccgaggaagcgctcatcgtcggagtggaaggcgatactgtcgtctccgctgaaatagtaatttaccaggcagaaattgtagccgggtgtttcatctgcgtttgcatttacgtttgctgcttcgacctgtctccgtaggagatctagacatgctgggattggccgcggcgtgcactggtattttgttttcggagttggcgttctggtctttgtttctagtagaacgaggctgtttgggtcgttgtcttgttcttggatgaaggtcgatgtttcatcgacgccgaagactgttgtccatcgtggtgtgttgatttgcgtttcaatgtcgccgcgtcgtgctgtgtattgcacacggtagaagggaagttcgcgacggaggaatttgaatagctcgtttgctgttgggcgggggatatagggctggaagtggaggaggtcgaggtgtggttgattatttatttcccggggtggctttgctggtgttgcatgccctaggcctacttcaatgtgggagggaagttgagctattggaattggataacttgggtgttggcttgggggtttggtgtcctcgactgggatattgtctgtctcgggtgttgagattgcggttgcggtgttagattcgatgaggtcggttttcgcacgttttggagcggtggttgatggtttgaagaatgcatcgagcgtgcgttttgccattgtggaatgggaagatcttgggtattggcaattggaattgaggcagttgcgcgcgacttggagaatttctcgggtgatgtcattttcgatcccgatctatgcattccgatctggcttggcacatattttgtagcatcattgtcatggcattctagagtaactccgaatcgctttctcgggctataggctatataattactgctgaactccgtcagtctcggcaatcttgaccaagtatttcaccgcagatgccttgccagcctctagatctttcaatgcgccttcgataccacccagtccaccttttcgcacttcgtatgggtggcctgagaaccaaccctgtgccagacctcgaccaatgaattggaagaaagcagctccgaactccttatcaccaacagtctggccttcggcaggatgcatatgaacagccccgaccatagtccgctcgatgctaatttgcttcggcaccttatcagcgtccgcaggtaaaacgacagtgatcttcccaggtacatcgagagcagcaccgagagtcacatagcttcccttctcggacacggcatcgtaagcatactgaatgggatcacccttgccagcagccttgatcgccgagtagacggcgtcatcgccttcacgataatcaataatcgtgtctcccttctctctgctgatcaacgtctcgacgaagggagcgcctttgccagcgatagcgatgatggggtgaatgttcgatagctgagcgaacttgatagcaaatgcgccaactgccgaggcaccgccatacacaactagcggaataggtttatcggcgggagcccaaggtagaggaaatttcagtttctgatataggcccaatgcagcagtcatcgccgcgagggggattgtagcagcctctggtcaataagtttagttacatccgcgtgatgactaggacggagacatgtcataccttcaaagctggtcttctcggtgagatggaatgtcgtgtgttcccacgcaatggcatattcggcataacttccatttggggtcatcatctcgtggaacgctgccactttatctcccgcgcggaagttctggactcctgctcccactgcttccacataccctgcaatatcgtctccctggttaatagtattgtttggttgccatttggggactttccagtccttcgggttggtacccgacactactacccggatgaggacctggccgggtttgggagtggggatctcaacgtcgcggatgacgaccgaagtggtgtcgtcaacaatagcttctttcattttgaactttgggaatcgacggtggaaatcaacagatcaaatcaaatagatcaagccgataatttatattcgattgatttgtaatgtcacgggaatatataaatgaacttattcccggcgcttccacggatttataatcagataccttagttttagataactagttgactagttagttagttaggtacatagatatattacctaaatctccttagtctgatattgaggaatagtctcccctgctcgccacttgtatttgcttccagtatgatcttcaggcaaacgttgcgatccaatgaacacctcgcgagccgtggcaccttctttctcaatttcctctcggaacagccctctccgtcttagttcaggcaataagaattcaatgatatcctcgaaagtcccgggattcacaatatgagcaagattgaagccatccacatcggatatttccacccatctttccaactcatctgcaactgtcgtaggactgccgacaaccttggcctgtagtccacccacactgatatactccacgatcctccgtttagtccatggcaagctatccgtgccagggacggtaccagagaatctccgaacaatggactggacccgcggcgagtcgctgaacaggaaatcctcatcatcagaatgacttgacaggtcgattccggtccatccaccgaacaaagcaagcgcaccttcatcgtcggcatattggagatagtcctcgcgctttgcttgtgcttcttcatctgtcgctgcgacaatcacgttgatacccacaatgactttgatatgcttgggatcccggccttgctgtttggcaatattccgtatattatccaccgttaagcgagcaacctcgggagtctgaccaccgatgaagattgcttcaccatgctttccaccgaattgattaccggcctcggacacgccggcctggaacaggaatggcgtacgctgtggcgatggctcacagaaatgagggccaggaacatcaaagtattttcctttgtggtttatctcccgcacaccatcgctggcaatgtataccccgagctgtcggtcggcgagcacggcgtcgtctcggaaacttccttcccagagcttatagagcacctcaagatattcatctgctattgcgtatcgctcgtcgtgaggaatctgctcgttcagtccgtggtttcgggctgcgctgtccagataagatgtgacaatgttccatgccaaacggccttggctgagatggtccacggtagagagtcggcgagcgagggcgtatggtttttcatacgtcacgctggcagtcactccgaaaataaggttctttgtgacagcggacatggcaggaacaagatacaaggggtcattgacgggaaattgtgcgccggatgccaatgcgggcaccacattcctagggcccttgtatacatcgtacgcgcccagcgtatccgcaatgaacattgcatggaaaccggctttgtccagcaattgagctaagtcggtccagaatgagagtgttttgtactgatcggtcttgtttctagggtgcttccatagcccaggtgccaaatggcccggggtgttcatgacgaacgcattgaggatgatctgctttttgccggacgttggtgtgacttcacccattttgagttggaattattcgaacgttcagtggatttgaagaggcacttgaggtctacgcgatgagtctttagcaataggaaccggtttgtatacgtagtgggtagaagcatacgccaagcgctgtcgccatcgcagggtcaccttttatctcccgtaatcggtattcgacatttgtgatgactattttgaatctcatgtcggccgataaattagcctgtgtggggtacgcagtgaccctggttgtgcgcgattccaagtgattttatcgcaatctgggagtcgaggcacgcaatcccaacgacaatccccctcacactcccatatctttcgcaatcaccacatggcgagcttattaactttatttcgttcctccaatggctttgcgtctagactctttagtcgtgtctctaccagtcattctgtatggcgcaattgcgggcaaggacgacgtgagatatctcacccacatggcaactctgattgttgcgcagtccttcagagaacccccaattggctatagatctacagagactaaacttggcattgaggatatggcggaccctccacacaataaatattcctcggccctgcaccttggaacttggctttactatgcccagagatgtctgacatagatacgtccgctttgatcccccagggggcggcctatggcctcctcattggcctcagtgtggtgttttgtgttgttgttttggttgctgtcaagatgcagaaaaagtatctttctgaagattccggaaaatcggaaatgttcatggtcgccaatcgctccgtagggagaggcttgtgtgcatctgcagtcttcagttcctggatgtggatcaacgagacggtgttgtgcgcggctatgacgtatcggtatggtcttgcagtgcctctggtatgtttctttatgccctcaattgactttgcacgactgacgggctatagtggtgggggtctggtctatgcttccaaattgcactgatggcagcactcggtgttatggccaagattcgagtcccttatgctcatacatcgctcgaagtagttcggatgcgctatggcaagattggacatctcgtgtttatcgtgctcaacctcgtcaacaacgttttcggctgcgcctcgatgattatgacgggctctcaactcatccatggtgtatctggaatgcactatgtagctgccactatcctcgttcccctcggaggtttgtttcatctttcttactgaagtccatcgggaaacaggagctaacccctttgtagttgttctctatacagccgtgggcggcttgaaggccacattcctgacggatttcttgcatacggccattgcactcattctgatcatttattttacgatcagtgttttgacaaactcggcgatcggtggtctgggtggtttgtatgataaagttacggcagtagctgcggataattatatccccagcaactaccaaggttcccttcttacattcaagtcgaaggatgcaattatctggggtttaattctcaagtttggaaacctggcacttgtcgttatggtatgtcaattccaaaaagtgatctttgaaagctcccaaggaagacttttcacaatcacgaacttcgccatgttctttccaaagctaacatatcaccggtaggataccgcattttggcaaaagtccttcgcgaccgaggtcaaagcgacagtcccaggatacaatattgccgcattggctgttttcggtatcccctggggtctaggcacagtcgtcggtttggcaacgagggcaatccacaatacaccaatctttccaacataccctggcatcctcactgccactgaagtgagctcgggcatggtgatgccatacaccatcaaagcgctcattggagacaaaggaatcattgcattcttcttcctcttgttcatggctttgacaagtaccgtttcctcctcaatgattgctgtcagtagcatcttgtcatatgacatctataagacatatctcaacccgaaagctaccgacaagcaaattgtgggagtgagccacttgactgtcattatccacggcgtctttatcaccggcatttccatcgctctcaactatggaggagcaaacatgacatggatcgggtacctgagacccatcatctcatgtccaggaattatccccatgattctcactttattctggtctcggcagacccggttagctgcaattgtttctcctgtgcttggcttcgcttcaggtcttgctgtctggttggcagtaacgcactatatgtatggcagtatcaacatcactaccactacaaatccctacccagcactatatgcagccgtcacttccttctttacgccggctctctattccgttgtcctgtcactctacaagccttataaattcgactggagagtgttcctgcgaattgagctcgcagatcaagaagaaatccagtcaccttcagacgcgagcacattgaaccggagcagcgaggaagaccacgcaattgatttgaaacatcccgctggatcagtctcaccggttgtcaatagtcagccagagagcatcaacaacgacccagagaagattactggcgacatcagcgaaaaggtttcgacgaacaaaacttcgtctccatcctccgcacaaattagccttgatgatattcggcacccattcgacgacgaaacattgaaagagctgtacagatggctcaagatcgcttggtacatgttcggggctatcgtgctgatcacgtttgttgcttggcctcttccactgtatcgagactatatcttcacgagatcattctttgcggggtgggtagttgtcgccattatttggcagttcgctgctttcggggcggttgtgattttcccactttatgacgggcggaaggatattgtgatcggcgcgaggggtatctggaagtcttacaaagagcttttcgggaggaacaagaaaaatcaaacgagctaggtagataataggtgctgttaaaatagagcgggaaccagatcggtcttttcaaatagaactcaagtcttcacgacagccttggaacattcttgctttcgtacggatcctcccttgatctcaaagccgtcttccgggagcaccagaatagcccatcctggagcagatgatcctcaacccgagattctctcctacagggccagaaaaccctctgaaagggcctcggattcgtcacttagggtgtggttataactggttcatccgctggggaaggcgctgattacataaaatgtgtccatgtctcgcaaaataggttgcgacttgaaacggggtagtgacaccagcccctgctacaacgatcacctttgagatccttacagagtgcggccttcgtatatttatacgatgcaactacaataaacggtagaaatacgatgcatgcccgcgaggtaaaaagaccaagaaatcgctggtcttaacgtttctcggatgtccaccaacggccctatattcagggaccgggaaatctcaaggggattccaaggggaatagaatgcttaacactggaagcaaaagtggaccctttgtagcaagatgggatttttacagccgcaccgagatgcagaagaagacatggttgaataggaatgttgcccacacaaagtgcatatacaatttgtcagcaacattgaagtcccttgaaaactgtcgtttagttagagagtgacaaagtgaagatcacctaggcatacattgccctaggactgcatatcttcaccaatggggttgtggcgttcttagaggcttaggcggggaggcttaagcagagctacccaatgcactaagccaaatctggtatacaagatgttccttgagcagatgcgattggccaatcttctaatccaagtggagtatccgcaactcttactacaattgtatatcggcatcagggcgcgtggctctgattatcgaaaattaactgcactgcctgatgaagaaaattaggaaaacatcgcgagcggaaatgtatctggaagggttaaatagcagacaagggcccacgattcgagagtaatacaaccatcagttcattttccgtcttcctcttgatcccagtacttcattcccttgtgattatgactatcgattatcggcatgggatttcgatcctagaggtcattgtttactctccatgcctcttcattgctctctggatggcattccaccatggtttcaaaaaaagctccggctggtactttttcaacatcttttgtcttgcccgtgtcattggcgcagcatgctatttggccacgattcgctatccttccaatatcaatctatatattacctgggctgtttgcacttcgcttggactttcaccgttgttattggcttgccttggtcttttatcccgagcgtgagcaaccctcttactcgtgattaacttgatgatttgcagctaacgacatttattagaaatgattccattatgcgaaagaccgccaatcctctccacccgttgatcttccgggttgttgcaacattttcactagtcggtgtgattctgagcattgtcggcacaacccagaattccgatattacccatggccttgtcacaatagagtcgaagattggcctcatattctaccttattacctggttctgtgtgttcgggctgttctttctgatcttgaaacgaacggaaagtattgaggatggagaacgtcgcctcctcttggctgtgggaatctccgtccccttgatcctcgtgcgattagtctactcttacatctttgcctttggtggagatgcagacttcaatctgctgtccggaaatgtcacgattcagcttgtgatgtgtgttttagaggaaattctcgttgttcttgtgtgcctgggcatcggccttacacttgaagtacgacccgctgctgaatacacacagcaacccagtacccacagcggagaagaaaatctgatggagctcgagagtggtcacctgccaggccaagcgcgtccaaatagacgagtccaaagacccaagcgtcggggtggacccattacaaaactcgtgatgtatattgtggatgaggtcaaggaccggaagcgatgaatgattgcatcgatcaagatcatggggttagaattggggattgggtttgaatggacttgtttactttgacacttataaggtagcatagattgactagctactagaactatttctacgccgtgtagaattataattaatacccttgttatgaagactccctctaattcttttgctcaaaatccatctctctgattgccatgcaattgccaaacttactaattattctcattgtttattgaagatgctgaagatgagaatgtgtgacgtcaaccatcagtgtcacgtaactaagcagcctgaacgtaaacggaaaaacatctcgactctctccacaagccttcattctccaatggatcacaacacaggtctccccttgttcattgcccaggagactctctgcttttatccaatcagtacaatctacaactcatgtccacgatatctcttctatgcgcttctgctagcaacctgtgtcactcgatggacaggatgggtcatggatgtatttttaggaactgcagcggcatatgcagggaccgcggcaattcaagccttcatcatggtttccagttaccagacaccccaagaccctggacctgtcactatcccatacctgtccgctaactccagcctacaaaacactttctcttctttgatcaccgagacagaccatgttatgatctcgcccgcatcacttgagcttgactcggatgctgttcttgcaatcgttgtcaccggttatctcgtctttttacccctccaatgctggtcccgcatcctaacccacgaccgagcacggaaccttctcttttatatctggcacgcgctcatgttgggtggctctatatgttccctcatctatgccgcgaaagtacccaaaatatccccacagtacatgttctgctttcctgatctcgtgcctttcaatgacacatcgaatgacggatggcaagcctcatggagaacatccacgtggaacgacagtgtgtgggatatattttcgaacctcgcgcgatggaatcaactaggagatatttgcttcaacccctgtttcaattcgacccaaattttacgaaaaccagactcattgcattcagccacggcagacggagacttcaaaattgctacctcccatagcttcgtgaagaaggttctgtactcgcatcgctacatctacagtctcatcattatttgtctgatcctgaactgcctcctcttgacttatcgatttctaccttatcgatcgcggatcccatcagcgcagatcatggtaatctggaaagaacggaagactatctggaaaagcttcaaagacgaagtttgcggtgcgatggatacaccaagcaatctagataataatggagaagacccgggacccacaaccaagaagacctctgtctggcgccgaatgcgacacatattcagccgtcagttcctcaaatcctttcttcatgtgcttgttgatgctgcaattctttttggcatactcttcagcatgatagtcagtccgttcaccgtcgttgcctttgtcatttggatagagatccaaatctccaatgatgggccgtcagaggagactccgagtcaggttggtcagtgggcgtaccccgtgtctctagcactgcttgtaatctcagctgcgattctgaagctcaaataccgactagcttcgtcggttgagcttgaacgtgagatttctgcattgaaagagcacctgggagccttggagaaaatgaaggaggcacgatcggggtctgagtcgactgcgctcacagctatgactcgtccggccaaggaaaactaggcctaacgatattgttcacaaaaaggtgcaatagaagagcttaatcataacaatgaatacattcacataattgatcacgagcttcagtgttgatggtgtctgatttgaaggcctcttgcttagtttacatgtctatccctatttcagactgacagtatcaaacttcctgacaacggtaagcacacctaagtataatgcaaggtcctctgagatcagaattataaaattagaacgaataataaatggcacatgtaagttgggaattgcgttatatggtgacctgtatatcccggctaggcgaaggcaggtatccctgattgattctgtagactgtccctccaatgtattccctggtccaggtacggagaacatgatgttataatagcggggaaacgagttatgtcaaggcgatagtcttctttcccgagatgatcgccttggcagtcctgcgggggacgggggaccgtgtcgcatgaaaataggaagaaaccagccaactatccttgttatgtgttatgcgtcacacagcgcggtcagtgcatgagaaatcccgaaaaataagacattcgattcgagaaacttgtccattggtgttatgaatggactcctatttaatattccttgctcccccccctgtcaaggttggtatgcgggtttctttgttctaccattctgtagggtcatacggagtacattacgcagatttaagacaaagggatttccaccttgttatccccttgttgtcccccctgtcattactgcccgcacctatacaatatgaatctcaaagagacaatctccaacaaagagttcagtgagaatgtttgtgttgatagcattcattccggcagaaggacatcacacataccactctggcaatcgttcaagaaatcccccaacatcgtgggctattgcctcgcgctaagctcggcaattcttctctacggatatgatcttgtcatagtggggacagtggctgcaatgcctcaattccagtaaatactccatccaaaataatacagaatttcgtcgctgctgacacacgaaagacttgttttcggccaggaactcaatggaaagtatatcatcccctcgatgtggctttccctttggaacgtctccagttgcattggcttgatgttcggctccatcctcggtggttattatcaagatcgtcgtgggcgtcggattacgcttgctataggcagtttcctatccaccattgcggtcgcaatatgctacatctccgatctaccagacggaataggaagtcgtcgaggggtattcttcgtcggtaaattcttccaggggatttgtattggcattcttctgtgtgttacacagacgtacatgtccgaggtactccctgttgctctacgaggaccggtcattgcattctatccgatcttcacacttcttggacagctggttgggtcgatcgtggtttatacttcgcttaagcatacaggcgcacaatcttaccggatttgctttgcgtcgcaatggccgttctcggccgttccctttgtgctagcggcatttctaccagagtctccaacttggttgttgagaactggacggacagagaaggctcttaaagcacagaaaaagcttgataacgatcatatcgactcacaagctgtaatcgacgagttacaggcgtcaatttcagcagaggacgaggagagcgcaacccatacatatgccgactgtttcaagggagtcaatatgcgccgaactatggttgtggcttttgcaaatatgataccccagatgttcggtttgcagctgttggcaaatgcttcctattttatgcagatcgtgggtatgggttcatcgaatagcttgatattcttgattttgggtattggactgggcctgatttcgaatgttatcagtctatgggcgctgaatgtctttgggagaagacttcttattctactgactctgggtatcgttatggttctatggtttgccattggaatcgcagggatcttcaagggaacagtgacaatttggtaagaccctatattggacgcttaagacgatgagctgacttggttgcaccaggtatacggcagtaagcatgatggctatcgctatggtctctggttttggatcgtggcctgcgtcccatgtggttgccgccgaagcgtcctcgttacaactccgagccaagagccaaggtatcgggtggtttactagtggcgttggcactgcagtatttgccatcatcttgccgtatatctataactcagatcaaggaaatctcagagcgaaaacggggtttgtgatggcaggattcgccgcagtggcagtcgtcggggcatggctggctatccctgaaatgaaaggtcggacgccaatggagattgatcgcatgttctcgttgaggttacggactcgggcattcaaaagctggcagagcgatgtcacacttaggagcgaaacagaagacactcatctgcccgctaattcatgattgttctttctacgcaattgaaggtggaaccgaaagagaccggttcgacgtggagacaaagtcctattactcaactcgagaaccaaatttatattcgttttatctgtctcagattagaccattacctgagctaaatatatagttggatccaatattcttctggtcgatccctcaatttgacctcgtctgccgggccctgtcagcagtctcgcagccgagattcgaaggggacattttcacatatcaatacaattggacagcctgtcgggataaaatgtaccaaaaagaaatattaaaaaatcagagtacacctattcagatgtttttatttttttcacaaaccacagatacccagcgatgcccaccttccaaggttaaagccccggagatcctaatgtatgactaatctgggatagagtgggcaatgcgagtctaaccatcctttctcacttgtcatatcctcgaaactcatgtcggataccccagagaggaataaacctagcaaacgtggaacacggaattccctttcgtgtgcacaatgtcgctacaaacaccttcgctgtgatggccgtaagcctgtctgctcgcgctgcgccacaaatacagtacagtgcgtttatcctctatcacggcgacgtggaaatccaaaatcggcgaaaccccggtcgcctgtcagagatgtctatgataacaccgtcgagacatcactgcaaacctccactgtctgttcttcctcttctaccgctataaacggggaaattgaatcaacttccaactcagctgcttcatttttgagtttatattatgagttctttcacgcggctcatccttgtgccttaccttttcaagttctcaagactcggctcaacgaagcgaatattcagcctttgcttcgagtgatgtcttatatcggatctatttttgatatttcttgtccgtctcaattgctagaatcttgtgctcaacgtgctcaggactcagtggtcgaaattcggtcatcaatccggcctcttacaccatttgacgttcaagctctgttgctttattctatcgctgtctactggtgcaatgaaacagaaagtggtgtggagctccttgacgaagcaattcgcatggcagtagcccttgggatgaacaaatcggaattcgcccgaaaccacgctgaagctgattctgtactagaggaaagttggcgacgaacttggtgggtgatttatatcaccgatgcccatattgccggtatgtcccctaaacatgattatttcccccaatttacattcctgataaccgcaggatctacccatacgtacccgttccgaacaagtggcattgaaatcactaccgaccttccttgtgaagaggaacagtatgaaataggggtaggacaactgctctattgctttttagaagtttgagttgactttcattaggtcatccccaccccacgatccctagatgattacgagaacagggaattccttgacgaagaaaaaagtgatttttcctcctatgcggagcttattggcttgacccgcgggattgatcgggccttgtccccgggcaacagtgcatatgaccaaatatacactacaatggctgctagctgcgacactagtgttcgagcatggtgttctcttctttctcctgaaaagagagaattaattcatcccgatggatcatttgatgaggtcatgttcaaagcattcttcattatgcacacgtacgatctgcacctttcttctctgttgtctatttgcctaaccgaagtctagatacaccgttgaaattcatcggccgctgtcagcgttgactcacagtgcgatcgaatccgtgtcgcgctgtgctccattggccccgtcggcacacctcaaatgcagcaacgcgaaggaacgtgacctgcatactgtcaaatgtacacaggctattaatagcattgatgaactgctgactctgccaactaatatgacaacccattctcctttcatcatttgcatgattgccaatgtgactattgcgcatctttcggcttgcaggttcatcttttctggcgaccggcgagccaaaagccgggagaagattcgtctgacgatgggcactttgaagcgtctaagtgagcactggacactaggcaaacggacctaccgcgagatcgggattatcgcccgagaattgctatctctcacaacggatccctcaattggtttggatgccgttgacctgtcccttccgggtccaacttcacctgcattcccaccattggacacgttgcctgacgccaactttgacatttgtgccttttttgatacggatgctcttggcctaaccgaaacgagttcatttattttacaatagattccatgagggcttaccctccaatgatagccctacagattttgaatcgctgatgtgattatcccgatgctttgacagtgttctatcaatagcttcgatacccagctattctcatttccggtactcctcatcaatttggatgagagcccccataccgtccctctcaaatgcttcagtatcgatgatcatggtagcaatgagcgtcgccggctccgtcttgctagcattatcgctgatgcgatgatgacaccccggcgcttcaaaccaggttccgccttcttcgatgattttcataggatcttcattcattttgttgagaagagtccctttgaggacatacgcgccaacgttcgcgcccccgtgacgatgcgggggagttgacccgttgggtgggaattcgacacgcaggctaacgatagtcttgttcgggatgccgaccagcttgtacgagtaggaaatctcgagcgagggcatcgggcggctgtatgttcaatcaacttccgagtgggaacttggtttggtgctttatttacctggagtcgtaggttggttcctgcatattggaatttgaattttttgatcggaaggatgtctctggttctgatgaagatttactaacccggtggaagttcgtcagtatttatataggagattggtcagatagtatagtctactttccgacgtcacggtaaaggatagactgttcgggtgtccgggagtagctataggctatcaacagatagcctaccgggtaccagaaataaagtacacacgtggttcttcgcacgaaccttggatataccttcatttggcgaatcattctccgtggctattctcgcaagtctcaatttgtgtgctggggataaccgaaatgctggcgccattcccgaccggacaattggtgatatctcacaggttcattatacggtctgcgaaataagcacgcattacgatgcaaagaggcatctttcaatgcttcttacgtgttctgaattgaggaagggccagcaagcactagtaagtgatgatcgttggtcaaggatataatctgcttttgactggagcatacgggtgggttccaacgaagacgacggcatgcgtaaggcctccttttgagcgaagagatttgtcaaagatcgacaacgttggtcgattgctacatgccaaactagaacgtcgcctagtgcgaactagaaaactacaagggtcccctgtccaattcccaattcggcctgtgaaaaataatttcaggggccgcccgtgcattagtcggaggcagccgtcgggtcgaatttctcgacacttcaatattgttttccgggatttggtaaagatgtattgggtttccaaatcccggtctactaatcaggtccctagagccgagtctctcgatgttgtatggtgatccttttggcccttctgaatcccccttcaaacaaagaaatgtacatcacatgaccccttgttcatttgctactctttttcaatcgcatgttttcccttatttcacaaccttggaagacctgattctccgtcaattttattccccaaagtctagtaatgatctctgagaaagagttcttggctcgcctccctcggttcatcagccactggctgggctatcgtgagaatgcaccaaagcctcccccgaaatatctcgttcatttctggtcgttcatagccgcattctgtggtctatgtgtggtacagggtatattcaattactcttcctacttcattgaacgtggcgtgccgggcatcattgcttcttatgtacgtctcgctttttccatgtgcccttgtcagatactgatccataagtagggagcatcagcggttctcgtatatggcgccattgagagccctctagcacaaccacgcgcgctgatcggtggccatttcttgagcgctctggtcggcatctgcatctcgaaactcttcagcttaatgcacaatgaagaaaagttcgactctttgcgctggctggccgcttcgctttcgtctgcggttgccattgttgttatgcaaatcaccgagactacccatcccccggccggcgcgacggctctccttccagcagtggacgaagctgtgtgggcactatcttggtactatctgccagtggtcttactttcatcgactatgattctgatggtcgctttggtcgtgaacaacattcaacgtcgctatcccgttttctggatcagtccacccgccccgaagcctgttcttccacaggctaccaattagaaatacagccatgcgcctttatcacaaggtgactatatagatgtcgagggattgctagggaatgacagtggatattgagacgcaatcccttatgaacaaaggagttgcgcaggaatagacttgccatgtctctttgggtggcaagtgcagtgtcagagttttaggggctcagtatgaccccgtcggatttactatgacctattaaaaagagttgtattcaacatgttgtctatataattaattgtccaaatcacacaatcaaacaagaactgtcacggagtacgtactccgttctccgtaggtttcccgttggttttccgtcggttgtgacactccacaagatcgtcattggcctcgccccgacccgcgttgccgtggcgcacgggttgccaaggcggcccatccatcgatcgccgagggcgggaaccttggaaggtggaaacgcagttcagatctgagatctgtataacgtgcatccatagatatctgtcgccatctgcaacccttatgcaccgtttcagcttcaagggctttatggtcaaatccgatctggctgaaatatgcgtctgttttactcggccgagaacctgaacacaaacacccatgttcacaaatgcgggtaatcacaggccctatgtggagctgagctctagtcgtataatcctttaggtatctacgtacgacataggcagctaggccgagaatactccgtaatataaatgaagctttgcgaatgcgaccccacttatcaaccttagtatagtgtaatattcttaagctatctacgaagtacagtctgttaatggatagtttatatgtatatactctaccatcatataataacgcttgaaaactaagtggtgagatgtatctatgtcggaatatgcatatgcatatgtgaacttgaaaacccggagcaatagcggtaaataaaaaagaccgaagccccgtgtggcaaatttcgtcgctccactaagctttgctggttttttgtctactgcgatcctttgtacaggggtagcctgcataggcccacacttggctccaagctggttctgtggcaagtgggggatggccgtttttctccttccagttcacgtaagggacaatagctgcaacatgacagggtgtatacgaggaatgcgccaatttacaatttgttgttttgcaacttctacatccatggttcaagagtcacggcattgtactttctgtagccaccggtagaattgggaaatgtggctgagtcaggaacacgactactgtttactgtttactgttcactcattatattataggtctacttccatggctaaattctctcagtgtctttgtacatttcatcattatgcaatatcacgccagcctcgcaaatacggtcttggcccgtccgaattcgaatacctagtcggtaatggtctctatattgtcgggatttgaatgattattgcgtcctcgatccatgactcagacattatagatgcaagtgcatgcattggtggaccggagatttcctaaaatacccgtttttagcgatgaggaaaccagcatgatatgcagtaagattttagcttcgggatacaaattggcaggcgatggaatccctcaggaacagccgagagatacatatttctaccccaggtgttatattccatcgttgactcgtgcaatgataatctataatatctatctcagtggtcaatgaagctgaactatctatattgatttcatacgtacccgcgtagcactcaattacaagcgaattgatttagtctgagatagagagcccacattttctgtaacataacggtgatgcacgtcacggtgatccttcttcattccttgtttggacaatcggggggcccgtctgcgagcatctagcctaaatgacgtcctactaagtgatgtatcaatcctttgcgtgcccaatccaggaaggggatataaagtgctcactagattcaagacacttcgtcaagcgagctgtcgatcatgcatatcggacatcagacacgataggtcgtattcatcgttgccaaggaatgtttgcaagatatccactgtgggtagattcagccaagcaaagaatcaacgtggctttgtcgtatccgcttgatatggccatttgagctaattccacccgtcttctcttggtttgaagtaacctcacgcatatggtcctcagtctagaactctccgggcgtccgagaccagccgctctctctcctcttgaaacaggaaaatgtaggcgactgtggggttttggggtgtataaaacgttagttcttccatcgataacttcttgcaacccgggatacatactttgacgagatgtctactatatataacagcaccgaggctccgctcaaccccatgcccatcgattccgcatcgtggcctataggacttgccgctttgaccgaagcaagtacgccagtcctgtggacactcactgcgattgtcggagcttcgcttctcgcctggctcagaaagccctggacagacgaaaatggtcaccaaatccccaagggcccgctagggcttcctatctttggtaaatctaacgctggcatacacaaagggcacgcattaacatgacttacaggttctttttactctttgactagatatcctgagttgactctggactactgggcgaagaagttcggggacctctattctatctggcttggaaaccaactgttcgtcattgtgtctgatccaaacattgccaaagatctcatggttaccaatgggaacgtgttctcttcccgcaaagaaatgtttatcaaaagtcaaactatctttgctggtcgaggcatcactgctactccatacaatgaccgctggtaagtttatcctagacttggctgaagccgctgctgaccctattaaaggcgcaagcaccgccgtattgcggccacatggttgagccagcgtgccgttgactcgtactctgctgtcttagatcgcgagtcgctctccttggtaaaagcattgctcgttgaaagcaaaggaggcttggcccccgtcaaccctcaagtgtgtcaatcccgttcctcaatccccccagcaattactgatttgtgaagcctcatgccggtcgttgttctctaaataacatgactactatcactttcggtttccgagccgacagcatccatcacccgctggtgggacgggccttgaagctcagccgtgaatttatgtatgcgcgcggtcagatatttattcatcttgacaacagactgactaagttactaggaattgcactggccctatgtcgaaccttattgattttgttcctattctgcagtatctcccgtccccattgtacaaacgcgccaagaaactgcacgaaggcttggtcgaaacatacggtggctttatcaaggaaaccgagcagaagatgaaggaaggcaagaaggttccggactgtttagctaagactatggttgaagtccgtctcaaagaggaccttgatgatttggatatggcaatccttgcatcggccttcatgattggcggtgttgagacggtaagttactaccatcatatcactattactatccatcactgacgcctcattcagaccgccgctattatgcaatggttctctgctcttattcctgcctaccctgagatccagaagaaggcccaggaagaactcgatcgtgttgttggccgtaaccgtctccctggcattgaagatgaaaagaatctgccgtattgtcacgctatcatcaaggaagtcgagagagttcataatcctttctggttaggtactccccacgttgccagtgaggattttgtctaccaaggaaagttcattcctaaggatactgtggtcgttctcaacacatggactatgcactatgatccggcccgtcattcttcccccgaaaaattcgatgtatgtcacccatggccagccctttgaaagacctgtttactaataagcgaaaaaaagcccgatcgttatatagacgaccccttgacatctgccgacagtgtcaatgtcgctgatcctatgaagcgagaccactggatgtttggagctgggtaagtactaccttgtatacgacaaaacacaaagcccaactaataccttctagtcgtcgcatttgccctggaatgattgtggctgagcgtgagatttggctgacaatctcccgtatgctgtgggcattcgatatgtacgagattccaggggagcctgtcgatttgaaagaatacgatggcctctctggacgctctccagtgccgttccgtatcggattgaagccacgacatgaaaatgttacgaagctactagagaaagttgagatttaaattatgtgtggcaggcaggatgagtgattaagagactgaagatgactgggatggcgttctcccacgatgagaatgcagatatgtatggaagatcatgaattcagtaccttttttctcttgatatatatacctatacgtaccggattttccctggcgggtggggctttcctatttgagctgccgccgcttttgtgagggtgcttaggctcaggctcactgagtagatatcagcacgggctcagatcagtgatcatgctcagattcatcacgtgcagatgactgatcctcagtatatgctcagtgagtgctcagtgatgctcagtgtccaatcagtgagcaacactgatgccctcagcacgccgcagcacaccgcaggctataccaaaaagggattagccccgcaggtagtttatactgtaatagctaggtctttgataacattgctgctgccctcattttttggagcactacatcccaccaaggaaatacgccatgacaaaggggcgcaggaaagagcggagaactccgtccgtttcaggatattatcgccctctgtcttttaagtgagagcggctcgagcccaaagtcttggatataaaagcaggccgtataccaacattagtatataatttttcacaagccttctatttaagaacctcttacctagtatccttgatatactatccttactttgaatacattctctgcctccaggacacaccgtacttaatcataggtagaaaagacttttttgccaagcgcgatgagattgctaagacaaaacgccgtttacagcgagaaaagaatggctatattcctagagccccacagacaggaggacttaattcgggagaaggacaagaggcttccaagaccaaaagtttacatcataaaactgtaaagctttggctgaagtgagttgggctgcatataaggtggcaattccttcccattcatgaataaggctgaccttcccttagttttactgcagatccagagaatgggtttgaatactacaaaacttcccttggttgtccagctccaagtcatgacatgatcaagcaattcattcgctggtacactagttctattcaaggacgactgaacgaggatgagctacccacggtgagaaccgtgagtgcgcatgccgaacggttttttggtgggtttgaacaattcacaaaatttaaaatcattctagatgaaaggaaataagaacggttaattaattcgtcacttaccgtctgatattatcataagccattctaacctcgaagtagtggataaaaaataccttgacggcagacggcatcgttatagaccaaaagaaagagaagctcaacttcacaaagcaggattttctgataacagtctcgtctttgtggcagacagatcaccaaaaattcattcctggtttgcttaaggtctttgtcttgttcgctcttcagctgtacctcttcactggggcaagagtcggatcttttatacaatatctttgagaacggactctatatgaaaacgggaagcagtatgacttatcgatgtaatatatttgggattctctacctctctgaggtcagctcataaaatgactagttagacggattttgtggtctagtaacagcttgggcaaaaaaatttgctaggaaccctacagtatttcttggtaaatcattacgccacatcatataattgcgcccagtcacaatcagatagccaatagaatatagagaagcgactcaatcggcacagggtttctgcatataggaaaaaccgtggcctgtcgtaggaaaccactcgcctggagaaacgagctgtcttgggatatagaaaaccgtctgtcgtaggaaatcgtccatctggcgaaactaattgtcgtaggatacggaaaactgtggcctgtcgcaggaaccacttatccagagagggcaattatccagggatactgaaaggattgggaaactgtgggccatcccatgatcacctagctagttgggcacttggaaaattgtgctgtgtccatcgggagtcctgctattgcttgagttggaagtcagcgtgcatgtgaaaaagggttggcccgcatcatcgtcaatcgcgcgcgcgtagagaactccaatgattggtcagtgcctttgctcttagtatgtgagtcatcagaggagccttgtagttacatgagcgccatcaataggtctcaccataagcttttttgaccaccacgaaattcgacagggttagaagatcaccagacatgtttaacgttgactgaggaattccttgattttttccaggtaaagtaggcggaacatgtgtagcaattacacatagatcttacatactatgttgaccgatctatgtgttggatgaacttgagttacacccgtgggaagtcctcacatgtgtacttgcatgatcaaaagtttattgattaagaggcagtaaatatgggctgctttcttatacgttatgggaaaatagtctgatttgtggtaacttgtaggtactttaaacgcgtgcggttgcgataacgaagttgatccacgggtcgagcgcctaggatatgtgtggtaaattgcaggatctgcttttgagttagccacacctgttgtataatcagcacgaagagcttcactcacatcaaacacccggttatctcgatgaccatgctctggacagtcgtctcggtcaaacatccggtcgagttcaaggatctacgaaatttcatccccgacctagtagagatgtactatcttggttagcataacaacgcatagcatctggaacaaggaaaccgtactaaaatccttcagtttaacttgccacaccacttctagccgccgcactgcgttcctccggcttcagctttcttaaacgagatgccgtataaacggcagagcgtggaagagtctaataccttctagtacaaaaatgacggttctgtactggcctaagggaggcgagtgtccgtagggacctagcatgcatactggaaagtgcattattgcatacgcacgatccgcagcttgtacaattcttttcgtcatgcctagccgaggccgggtgactattcgtaccacgcgggttgtccgtgcttctagtgtagtttgcaccgtgtccaccgaagctatatagaaattcttataggaagctataagcatgctctgaatccctagtgtggtgcctagagttgtatatactgcctcggccgagccacctactccaccggcactgcaatatcgctataagagccggttcgaagaccgcgcgagggcctattgggaggtgatacgccacgacctgtggtgccacatggtatgcagacacgtcccggcatcctaggcaaatccagcgtaaatacctctaagtagtacctagtagtacctagcggtaggaagacccccggtcgattaaatgatagaatagagcgccggttgcaattgaggtaaggatatagtagactttgaggccgagttagggccaccgtcgaagaatcgtagcgagcgtctaaggtaagattgagacgagactatatccggcctgtgtcatgtgagcctcttcaaataacatataccgcgggaaatataggagcgctgcctttttgcggcccgtttcacatactaggagtggaatgataagggaggttctaagggcagtatgtcgagcaactatgcctacgaaagacccatgaaccatgtaatgtagcatgtaaatacggcctagctaccgatgggtctactagaaggtgcctcgttcgacacggtagacgtgggctagaagatcgaggctaaatccggagtagaggggaacaagatgtgtgactactaagcatcccgctcgcttctgcacgtccgcctagttctgggtatgaaggctgattgtaatgatgttggcaatcactggggttgtaagcactcccccttgcacgtatgccgtgatatctagccactggagcacggttggcgttggcgcctagaagaagcgtctccacgatactacgtgatgcagtcggaagggtaagtggccgaatcggtggccgaagctgtagtagaccaagcatatcattgcgaggagcccacaaagaccaaatttgtctggggtggaagccctagcaagccatttgacaaaatttgacgcaggatgagacatgctttcaggtgaggcaatcctcggcattgtaggattatagtatattttccgaaaggctgaccggaaaacgctgatctagagcttttattttgggcggtcgaaagcactttgatgttgatgctgttcagatcagagacctctttcatggctcatactagagatgaccggttgacaattgcaaacaattgagtcctcagcaggacatcaacgacagcagtaaagaaatcatctcggtgttcagagccaaatggcgaaatataagaaaccacaagtccacgcgaacaactttacggcctgtggaactacattgtttcgtaaccgtacacatacttgatagagagttgggtcgtaggtagtacttaaatatccatggatattgagatcatatagctcgaaggttccacgttgatatcaagatcaaacttggaggattatgacttctatatccccccccccnnnnnnnnnnnnnnnnnnnnnnnnnnnnnnnnnnnnnnnnnnnnnnnnnnnnnnnnnnnnnnnnnnnnnnnnnnnnnnnnnnnnnnnnnnnnnnnnnnnnnnnnnnnnnnnnnnnnnnnnnnnnnnnnnnnnnnnnnnnnnnnnnnnnnnnnnnnnnnnnnnnnnnnnnnnnnnnnnnnnnnnnnnnnnnnnnnnnnnnnnnnnnnnnnnnnnnnnnnnntacccccccccccccccccccaaatatttctcaaaacatcccattaaccctatccccagtctctaaaagaccccttaaggcttctcctccccaatcatcgcaaaccacctagccatataatcaatccccggtttctgatccctcggattccgcggctccggttcaaggaaaccgccatccggaagggggatttttttctttcgagcgatattactcaattcaatagaatacatacgccacccatcccagataacccaaccgagtcgtcgccacggtttcatgttcgtcagcgagtagcatgcaggcactgtccgcgtgagatttataccactgagatagaggtgtgcgatgtgccagtgatgcgaggcacggtgtctcggcgcgagcatccaggcggatgttaactctgtgtcctcgggaggatctggcgtagcccagaggctgatatcttgtgactgtgtgggtggcaggtcaaatgatgggaagaaaggtattgatgtttcttctggagcgggccagatagtttgggcgggttcttctgcttctgggtcattaggcagccagttaagggtcagacctagatctgagaggacggcggatactgtccagagtctttcggctgtgcgatagtcgatttcgctccaggtgttgtatgcgtctagttcccggattgaggattcgttccagttccatcgctggattgctgctttgcgcaggtgggagtagtgatgcagatgccagagagcccagtatgtgcgatactcttctgtccaggtgaagggttggctggcattttggatttggagtgggggtccacttattgaatccgcggggatattatcaagagttttgataagaccttctcgcataatagagagacatttgcacgcaagccgctggatctgcgcgcctatcttaagtatatgccgtgattctgtgtaccctaaagttggcggatcctcgcatgtctggtgatagtgctcaagatccgggcattgcagtgaagagatactgaggtgccagatgttatagcatagcttttgtatttctggcatataagtaatcggatttaagaggatcagctcttgtatgatgcgggtaggctgggcctggaagacggcattgagtcgtcgagatgctaacaggctgtttttaatgcctgcaaaatcaccgatattggcgagaatctgttgaatgacttcagggggcagtttctcgaaagaatccatgttgtaacttctttgagtggtgagagagatatgtagaaggttagattctctacaacgatcgagatctagtcaaatagctaggtgaagcctggcaaaccaggcaacggcatgtgatcggcacgtggccaccacaacaatatctatacgaaaacaatccaagtttataaatcgaaatttcgaccagacaaggtttagtgccgggaagcttaattgtatgatcttgctccttcctcccctcgactcttctctttcttttcctcatcccgccaagtggtgagagagatatgtagaaggttttattctctacaacgatcgagatctagtcaaatagctaggtgaagcctggcaaaccaggcaacggcatgtgatcggcacgtggccaccacaacataactgaagaaacttcgggctgggaaaggtagatgagaaggggggagcttggagatattgaagggttgcacgtgatgggattagcgtgtcgcattttattgatacagcgttcctaatgcttaacgaagacaaccaaattctacttttatagttgggatatatataaagcgcaaaatttacatcgttcaaaaaactcgagttcaatttgcgaactagatagactgctttcactctctcaaattaatgagcgagctatacgcataggagcagctttgaaccaagcaccccaagtagcatactcgactcttggtggaagatccacatcgagagcagagtcccttatgaagctgtggacgtccatcttttcaatcgggatgaaccagcctccacggtcgagcctgggatctttattccacttggtgtaaagaagccagacgacgaaaagtagaatcacaagcggtgcagcaatgtagttcatgaagaatgtttcagcatcctttgaagccacagagacataaaattcggcgatgagacacaagatattgagacccagaccgatatagctcccaaccacaccaaggggagcggcataggcaagctcgttcacgctgtgtccgttatgcgcccaggcggagcggaagcggatatgggcaaggcagatacttccccagatgaagaagtcggagataccagacaaggcaagaagccagtcgaaaatggtgcttcctgatggcgcctcgttgatgaaagcgagcaaaccaaaagcaatctgcaggataatacagtaaaggggccgaccacctttgtcaatatatgccatgaatctcggtgccatgcctcgggaagccaaagactggatagtacggcttgagccatatgtcgcggagttcgccacgctgataactgaaatagtgatgatcgcattcataacagagggcaatccagagataccggcattctggattgatacgacaaatggagaagccttggtgttggcgccagatgctccgagaagccagtcggcgtcagaaggaacaatcaggccaactataaaggtgcccaggacatagaagatcataatgcgccagaagacctgcttggatgccttggggatggacttggcggggtttgccgcctctgcagcagcaaggccagccatttctgtaccaccgaaggcgaaggctgctgtcacaaagaccgaacagaaccctctgaatgttgtgaatgcaccagggtcatgccagtaatgagctcctatgtaacctccgttcggggcgccaccgcaatcgatcacaattccaaggatgatgaagccaatcacagcaatgaccttgatcattcccagcacgaattcgactataggccgacgttagtatttatatatcttgtaaagatataaatgctttttcaccttctccgtagcctcgaactccgaagaactggatcgcagttagaacgactagaaacactgccacccagattccgctgttcaaagtttcactccagtactgaattgtcaaacttgcggccgtaagttcgaagggaagaatgatgagccatccaatagcgtagtcccagccgactgcgaatcccctatcataaaatgaggagtcagtcttttgaccatgaatatagtacatgaacacggaaactcaccaggctgggctaatgaaccggacgcagtatgtgaaaaaggctccgttcacgggatatagcacggccaattcgcccaaggcctgaattgtaagaagaagcattcctccaacgatcaagtagcatagtaacaaagacccaggcccacccgtacggagagcagaccccgtactaacgaaaagaccggctccaatagcgccaccttactgaaattagcatcagaagaaaagtaaaaaccgttcgaggacgcataccaacagcgatcatctgcatatggcggttcttcaggttccgcttcagcgggttgagttcaccgacgctaacatcatcgtgagctgaagggagactttcagctggttccacaatggtgggtgctttcttctcgacgtctgagtccatggcggtcatgttttcgaattttacgccaacgccggcaacaaaacttatccacggcgagtggcaatttatataaaagcccagccgcagataaccgtctgatttgcatcccgcctatgataagaaaggcagtaagcctgatttgctcagctcgtggcgtagtagagagttcgtatacggagtagatgtgatcagactgcaagatgaagataagactttgtgtacttctcacgacccgttgatatggccaatcgtggccaatcaggaggagagcccagagttcttgtttgagcttagttgacacgctgctcttggcaacatgatcttccccctattttgcggggccaattcgttctctcaatggtcctcgcctgaaaatacggagaagctcatctgttttaggaactcggggtaaacttagttggacaccaattctaagaccccagataagcccactttgactttcaaacatgggggtgaggtaggtctagggttgcagtgtcgaaccccatttccaacctcacatgccggtgttcagctagaagatagtatagagcatagagaaatccgcatctaacagatatttgaaatatgctttcaactgaagtgaatccgatcagatgcgcatttcgcgcgccattctcacgccatgaggcgtgcccgaagaggaatctttttcctgccgttggctggaatctcccacgtcaatactacgctgtggtgaacggtttacccttatcatccgccaatatactttcgaggaaaggaagagatacacatcacatacgcgttaaattgcccgggcgctgacgattggcggtgcctcctatctcaggggcaatgaaacgccgacagcctgtagaactgcaaatacccgatatggtacctccgaggttgtctcagtgttcgtgggatagatggccatagtaaccaacatcctaaggagacatttctattgaaagatatcatttcatgtgcgatcaatgtatcaaacaattgccaaaaatatcaagtccaaaagctcgcagaaaaccttcctgaaacagacgagccctgtctctaaccgaagtgcggcaagggcgtgatgttctacctatcccagtgcaagccacggagatggccacggttgccttcaatcgacactcgcaattactcacgcaacatgatctgcaatgttatactccgtcaccgcgcgaatttgattacttatgaaactaggaaacagacctgtggcaggtgctagtcaataccactgctagaagaaagctctcaccattatttcaatcacagcatacagaatactctttgaatatgcccatttcgagcttgctgttctgtatcttgccttgacgcgcggcttctgccttgatcacattcttctgggccttcgacgctaccttgtcccggtgtacatcatctatacgaaggtaatgagccaagaacaatacaaaagcttcaccatcctccaatgcttgagaagaaaattgaccggagcttgaaggaagcgcatgtgctgcatttctaatgagtacaacgccatcttgctcccacgttggaagaggtaaagtccatattggatacatgctttcaacatgaagaaattgaataatctttgccaacaggtttctttcaaacagcatttctcacgcagttgacaaatcacatcaaccattgcgagtgtttcgagatcaggacattcttcgacctcgtaggttgaccaatcaaggggatcctggctgagagacgtgatagcagcagacatcgagctttctgaaaagaagtatccgaagaacccgttcccaccaaagacaaaatacatggaccccggttcgacaacttcatttacacctgccgcagggatgaagcccccaatcccgacgaggcctctgtcgacatttagtcacggaaacacacataatatggtgaatgactggatcaagtgttttaattttctacttactcgtagttcgggggatatgggtactccgtggtggatcatctattagatatctgatgcatttgggtatctctaaaagtgttggttgtccgcatgaagcttgacagacccctctttggtaagctctttaccctcctgcagagacgcggtttggcagatctctgtttgcttatcttacagggatgcttctcccgcgttccagcgcaggaattctttgtatcattgatgtatttgggtgtccactgttcctatgtagtgttctagacccctctttggcagtatccttgctcttctcgcagcctcatgttgtttcacttgcggcttcatgctgcgccgtgttgtgttagtatcttcttctagtcgagctgttgctcatcttgctgaagatgcttctcctggtttctagaggaggtttaggaggtggtccacaaatttattcaaagagcttcatgtcagtagctagatgaccatctccgtctatctacacagatttctcttctttgttcgtaactctctcactttctttctcattgtcacattgtctgtatatgtgcatcattttttgtccttgtaaagtttagagggttttatggcagtagctagatcatgatcaacattttatctcagacagatctcgcattggttgatcatcactccccactcttcctatcagaagaccgaaatctgaagcagaataacgcagcagctgcgatatcttcacagtgcttcggacaggtttggtggggtacgttgactcttctcataacgactatgaagatgggaagtcaaccgaagcgtacaagcgtcatttgacatagatccttacctatttgggcctggccttgcccaattgtagagctagaaacaccactcgtcgtgcttctaaagtcttggactcggctatatgtacttgatcgcgatcttacctttcctccttcatgaaacactcctagttaataataaaatcctcccaatgtctatggcaaaagactttacagaagaacaggacagccaaagaaatcttcctaattgagagaacttggtgcaaatatataggcactggaaaatgagagcaaatacaatagcagcaaaaaaatgcatcgtttcagcgtctgattacacgagtaattaaatccaagaatgcggagtcataatcgaatacaccatgtatatcccggttcacatcacaacacagcaagagttttgcttcttggcctggaattacttgtgttagtacattcaagtgaaagctacccttgacccttgatttgcatacctgggtatagaatttcttgctctgatttgacagatcgtcactcttctgaaccagggtgtcgatcttctcaccgcgctccaggacactttcgatctggatatggttagcacatataatgggctcatacagacctaagagcataccgtcttgtgaaggacaatcttggtttcgtcaagctcctgctggatcttcatgatgctgtcggcctgggttgggtcctggtacttgacgatatattccttgagctgcggcagggggcacgcattctcgcgcaaagatgggtcggagaaggcagtgcgtgggtacttggcaagaaactcgtccacaatcttgctcaaaacctggtgggccaccagggcaggatagtccccatctgttacaataacaccggcaacaccctctgtccgtccgtaagtatggaatgtgtaggccttctcctcaatatcctgtcgttggcccggctttgtcctctcggcgaccgttcgggtgaagagcatgaggaattcatcgtagctattaagcgtttcgcggttagtgacctagctgtgtcggaccaagagaggatgggtggatatacctctgacgagtaaagcgcgaaaagctagtgacaattagcgggttgttccagtcagttgcagggcgggcatatgaaattacccgtggaggtccttttccccgcatagctcgacagctggcttagggtcgttccggaaaacctgcgaggttgataaataagtaccgtatctcagctaatattcaatcaaatccaagctgtgataaaacatacgcccatataaagaatcttcatggtgacagggtgttgtccgcacagggacaaggaggcaagtaggtgttggggtcagtggggcgttgcgtggtggtaggtgattatcaaggaaacactctagtgtcaaagaactaggcaactcctttatattgtgggagatcagctgtatgttcagctggagtggcgaagcaaagtgacaagtgttaggcctaaaatagactcctgagttgcagataacaatgatgcactggaccctctggattatggcctgaggcatgtaaggtacaccgctcttgtcatgcgaccaattgatgttgagagcctgcgggcctggccgataaccactttgggttccctacaatattgtacattctttgtcgctcagcataactatcacatcttgatcattacatcaactagacagccctctcctaaacatggacagcatcgcagctaccgagtcacaatggctgttacaactagcagctatgcgccaagccattgccgatctgaagctccccaaggaccttcctcatgaagcgatcggctatggaagtgatattgatctggatattgacgacgactactcatccccgggaacaaatgatgatgtgtgggatatcatcagctcggatgatgaatcttccgacgacctggatggactcgacggacttcatgtcgcaccaggatcctcctacaatcgattctggcttgaagataagtgccaggatttggctatgcggaactcaactattaatgcgacggagcttgctgggcaagtcatcgccaccctggctgctgacagcaacgacgaagagctacaaatgtccttggccgagattgtgggattcgatgacctggatctggtgattgagctgattgcacacagaggagaaattctgtcggacaagggaccccgcttggaatcccagacagatgggctcatggcaggtagactccaaacacgagcagagagagaacatgctctgcagcagcgcgacttcgaacataagaatgcagcgctgatgccggcccaaacccgatcggagccttcctacccgcatgttttcaaacaacacacctctggaaatacactttccgccaatggaaagaaatatgggctgcctctgggtagtgagcagattgaggaaccaaagtacaccgaattcgcgattccagcgtcgaaggtcggaacacttggaaaaggaaggaaactggtggaaatcgctgaaatggatggcctttgtcggggtaccttcaagggctacaaagccctcaatcgtatgcaaagcttgctctacgatgttgcatacaaaaccaacgaaaatatgctcatttgcgcgccgactggtgcgggtaaaacggatgccgccatgttgactgttctcaacgccgtgggaaagaacacatctcctaatccgttagaaaacccagaagcgactgagttcactgtccaacttgacgactttaagattgtctatgttgctcccatgaaggctttggctgctgaggtgacggagaaactcggaaaacgtttagcctggttgggggtcaaggtccgcgaactgactggtgatatgcagttgaccaagcgggagatcgttgatacccagatcatcgttactacccctgagaaatgggatgtcgtaacgcggaaaagcactggagatacagagcttgttcagaaggtccgccttctcattattgatgaagtccacatgttgcacgatgagcgaggagcggtcatcgagtccttggtcgctcgaacccaacgtcaggtcgaaagcacacagtctctgattcgtattgttggtctatcggctacccttccgaactatactgatgtggcggatttcttgaaagtaaacaaaatggccggcatgttcttctttgatcaatcattccggcccgtaccccttgagcaacacttcatcggtgttaaagggaagcccggctccaaacaatctcgtgacaacattgactccgtcgcctatgagaaggttcgcgacatgatggagagaggccaccaagtcatggttttcgtccactcacgcaaagataccgtaatgactgccaggatgcttatgcagctagccgcggaggagggtcgagaggatttattcagctgtcatgatcacgaaaactattcgaatgcccttcgtgatatgaagcatgcccgtgcgcgtgaactgcgcgaccttttcgctagcggatttggaacccatcatgccggaatgactcgaagcgaccgcaatctgatggagcgaatgtttacagaaggtctaatcaaggtgctgtgctgtactgctaccttggcgtggggtgttaacctccccgcagccgcagttgttatcaaaggtactcagttgtataacccccaagagggtaaattcattgacctgagcattctcgatgtcatgcaaatctttggtcgtgcaggtcgtccacaatttcaggacaccggtattggatttatctgtactactcatgacaagttgactcactacctgtctgcggtgactgcgcagcagcccattgagtcgcggttttctggtcgacttgtggataacttgaatgccgaaatctcacttggaacagtcacatctgtttcagaggctgtgcaatggcttggctactcgtatctctatgttcgcatgaaacgtgagccgagaaactacggaatcgagtttgccgagttgcgcgatgatccaatgcttgtccaaaggcgtaggcagttgatcttgcaagcagcacgagtgctacaaaagagtcagatgatcatcttcaacgacaagaccgaagatctcaaagccaaggatgttggtcgtatcgcgagtcaatattatgtattacaaaccagtgtcgagattttcaacgacatgatgcgcccccgatccggtgaggcagatgtactcaagatgatcagtatgagtggagaattcgacaacatccaatccagagacagcgagtcgaaagagcttcagcgactgcgcgaggaagttgcgcagactgaagttgccggaggaaatgacacgccacacgcaaagacaaatctcttgttgcaagcttatatctctcgcgccaaaattgaggactttgctttagcatccgatactgggtatgttgcgcaaaatgcggcacgtatctgccgtgctctcttcatgatcgcgttgaatcgtcgctggggctatcaatgccaggttttattgtctctttgcaagtccattgagaaacaaatatggccctttgatcaccctttccggcagttcgacttgcctcagccgatcctacgtaacctcgacgaaaagcttccgactacttccatcgagtccatgaaagaaatggagcctgcggagattggtcagcttgttaataaccaccgcatgggcaacacattggccaagctcttggacaatttcccgactctgagtgtcgagactgagattgcgccgctcaatcgcgacgtgcttcgtattcgccttgccatctaccccgagttcacctggaattaccgtcaccatggagcatccgaatccttctgggtctgggtcgagaactcggaaacatcagaaatctatcatcacgagtacttcatcctaagtcggaagaagctttatgctgaccatgagcttaacttcactattccgctgtctgatccccttcccagccaaatttacattcgtgtgatctccgaccgctggctgggtgccgaaaccgttagcccggtttctttccagcacctcattcgcccggacactgaaagtgtgtatactgatctactcaatctccagccacttcctatatcggctctcaagaatcccattcttgaggaagtgtatggacaacgattccaattcttcaaccctatgcaaacgcagatcttccatctcctttaccacacaccagccaacgttctccttggttccccaactggcagtggaaagactattgcagctgagctcgcaatgtggtgggctttccgtgagaagcctggctccaaggttgtctatattgcacccatgaaggccttggtccgtgaacgagttcaagattggcgtaagcgtctcactaggcagatgggcttgaagcttgttgagttgaccggtgacaatacgcctgatacacgtaccattcgagatgcggatattattgtcaccacgcctgagaaatgggacggtatatcacgtagttggcagacccgtgactacgtcaggaaagtcagcctcgtgattattgatgagattcacttgctcggtggtgatcgtggtcccattttggaaatcattgtttcccgaatgaactatatcgcttctcaatccaaaggatccgttcgactgatgggcatgtccaccgcctgtgccaatgcttcggatctagccaactggcttggtgtcaaagaaggactgtataactttcgccattcagttcgcccagtccccctcgagattttcatcgatgggttccctgaacagcgtggtttctgtcccttgatgcagtcaatgaatcgcccaaccttcctcgcgatcaagaaccattctccagataagccagtcattgtcttcgttgcttctcgacgacaaactcgtttgactgctaaggatttgattaactactgtggtatggaggacaatcctcgtcgattcgtactaatgtctgaagatgatctggagttgaatctcgcgcgagtgaaagatgatgctctaaaagaagccctcaactttggtattggtctgcatcatgctggtttggttgaatctgatcgtcagctagcagaagaactctttgccaacaacaagatccaagttctggtggcgaccagtactcttgcgtggggtgttaaccttccagcgcatcttgtggtggtcaaaggcacacagttcttcgacgctaaaatcgaaggttatcgggatatggacttgaccgacgttctgcaaatgctcggtcgtgccggtcggccgcagtttgacacatccggtatagcacgcatcttcacgcaggactcaaagaaggctttctacaagcacttcctccacaccggtttccccgttgagtcgacacttcacaaggtcctcgataaccatcttggcgctgaggtatctgctggaactattggaacgcaacaagatgcactggactacttgacctggacattcttcttccgtcgattgcacaagaacccgtcatattacggtctcgagatctctgcagaggaacaaaacaccatggcagctcaggccacagctcaagatttcatggttgaattggttgcaaagtcgctcaatgatctcgcagaatcgtcctgtgttctcgtggactcggccaccggagaggtcgattccactcccttcggcaagatcatgagttactactacctgtcacataagacgatccggtacctcgtgtcccatgccaagcgtgatccgactttccaggatgtcttgagctggatgtgctctgccaccgaattcgatgagctgcctgtcagacacaatgaagatctgatcaacgctgagttggctgagaacttgccgctttctattgactgcatgggcgacgcgcccctatgggatccacacaccaaggccttcctcctcctgcaggcctacatgtcacggatcgatcttcccatcactgattatgttggcgatcagacatctgtgctcgatcaaggtattcgtgtcatccaggcctcaatcgatgtcatggctgagctcgggtatcttcctgcgtgtcagatgctcatgaccctcctacaatgcatcaagtcggcgcgctggcctgaagaccacccattgtcgattctgccaggcattccgaccgagaagccacctagtggtctcccgggaactcttgtatcgctctcgtcacagcctgttggtgcagtcgccgctctggtgaagaaattaaatcttccatttaacttcactcgcattacgtctcagctgcctcatctgtcggtcgccattgcaaatgtttctgctaagggcgtggctgtgtctttgacacggcgtaaccagcccacaaccccagaatgcaaggtctacgctcctcgattccccaaaccacaaactgagggcttcttcttgattgtctgcagtgctcttcccaatgggatggatggtgaattacttggcctgaagcgtgtttcttggccaccagtgtctaagcgcaatggaaacggcaaggacaagggcaaccatggtgctagttccagtcgcgcaggagctgccaaagataacaaggttgacgtgttgaccgttcgctcaaatattaaattccccgaaggcatcctcgcggattccacgagtacgagcacaggtcgggtgaatatcagagtcatcagtgactcgtacgttgggatggcatggactgtttccaatatcgaagttaatttggatactggcatcaatacgcagactgtggcagaggccagcattccaacgaaggactaaaataagatgctcaaactgtttattaccatacgacaagtcaatgcatttgcgaaaggtactggactaaatgtaaaacaccgacaatgaataacatgagcctttcaaggaatggattgagatgttgtagaaagtatcaagaccatatttggagaatagagaacgataggtacatgtagacaacgtatgagaggcggcaaaggggaatcacttatagaagaaaaaaagtaaagaaagagggggggcgaagaatgtcatagacactctatctgcaactcctgcgagacaccagcccgatgtccccggtgagcatctgtaatctgcggtgtcagaggtcttctctgcacaacccgctcctccggggttaaatgatcgatcctcatgccgatgggaaccagaacctgctgctttgcccgtgagacagagacagtgcgtgctatggagacctcaacccttgggataggacgtcggggctcgggtgcaggcgcctgttcagcggtatcaggtgtctcaacggcatcgacgaatggcatgcgcatggaatctgctggcgatacgccagatttaggaccggttgatgctgataatggagacatgattcggtcaatcttgtcctgggtagggtttaatgctgaaggagagcttcgggacggactgctagatagtgtgtctttcgcgggtggttgcggtcggtcttctgtttgaactctgagacatggtcgcactgagtcgttggttctttgttggctcgacgtcatatttggctggtgttgcggtgaagtaacctgagactgtttttctatggctcgcggcagggaatctttcctcggctgtagatgaacccagggctgagcgaccggctttgttacaacaatattgtgtggttgcacactctgttgtggccgggtcttctgcgaggatagggtgttcttgtccggttgagaaatcttctgtgattgaattgttgtctgtggttccggcttgatagcaggaagaggtttgtcgtagctactagaggactgcggggtattggaacgctcggagaaaagcttcggaatgacaggtgactcgaacgatgagacgctatccatatttgaaccataacgaagctgtggcgcaggcatccttgatgggctttcgatagggagtgtctttgctcttatcaatgggtttggtccacgagagaaattctgagtgccgagtatctgagccgctttcgaagggtgtgaagttggaaataaagtaaagtctgaccgcgctggtgatgttgcccggcggcgttggggcactgggggtggtgctggcttgaggaagtcctatatcaatgcatctattagtctcataccggtttctcatcgatgaaagaccatacatttgcgtctggtacgagaagattgtccaatgtcttggcccttctggccagcagtgagggtttttggttcttgttgacgacatcgctgaacatgacactgtaccgctccatctgaatatccgggatttcgacactaagtaagagaccatgggtacttgattcatctttggttggcttgttgccgagtgaaaaattgcgactccgctggggagtttgatcgcttcgaccaggcatctttctgggttcgacctcaaacttcggccactcctccgtcgagttctttctcagtcttgctttcggtggtttctctggtagcttatagttgttgctgtgtggcttgaccacgctttcttgtgcgccatccgggatcgatgtaggcgcattctttgccttgaacaatccgccgatcttcttccacttgctgggcttatgggctgagtctctttctgcgataatgaatgtatcaaatctgggtggtggtagcggctcatctttggttaacatgccgggactgcccagcgcaatgccaatcatgtgttgctcggtttgggcatggtcagtctgaatggcttcatctggtggtgcggttatgcgaaagtcgaaagttgcaccttggcccgatggtggcttttttagccacccgtctcccgcagagggctggctgaaatcccactggccaatcatgggttgagctggacgctgtgagacctcaagagagaaaaggtcgtcccgtggtaaggcatcggtataggtcaaaacaggaaaagagatggtctccttaggttgggtgcgtgaccggactgttgtcatgccccttgccatctctgtaattgtatattggaatccagccgataataggaatgagtgttaaaaggagaaaataatggaaaatgatggtattaaaggagagcagatagtaaaagaagagacgagccttccagaaggccaacaaaatgaaggaaacgaaacaaatagcaagacatcagggtataggccagtatattaatgaaaccagaggaacagattgagtggagaaatcaaataaccatataaacgagagctagagttaaccaaccggtctagtctgggactaaaccaacgaaacatgagaaacgaggccaaaactcgcaacctcattctgttttggaatttgaggggcctctcggcgttaatattcacgcccgtgtgagatgcttatttcccgccggacgaatgagcgcattggtcgacggattagctcgctaccaggccggaggcgtgtttcacctggtcaaaactgagacaatggcgtattattttccgttttacccttgaatcaggggcctttttcgctctggagcaatagcattggatgcccacatactcagtacagtgcagggtcatgaatgtcgtgactcgtgaattctccagcttcgcattgtgagtcgccaatgcaatgtgatgccaagcctgtctctatttccaatgggcatatctcaaggtctaagtactccgtatggtgtacggagtaagagacaaggctgcctgagacgaagataagaccatctgagacgaaagatgaatctgctattggtaagtagcggtcagatcaccccttgaagttttggggtttaggcactgtaaggcagcaaagcagtaaggcaccaaggcattcaggcattcaggcatacaggcactcaggcactcaaggcagcatgatgatcgagtcccgtgatctcccgtgatgatcgacggtacatgaagtgactgggctaactggactggactggtaccgcggcatgttatatgtatgtcatacatattcaatgctgtactcgacatgactgccttgaatcaacagaaaagttgttgatgttaagctcctctgtatatttaaagatctcccaccgctacttggagaatatccgatatcttatacacaactccacaccctacacaccctacacaattattacaatgtccctagcatagacagattgaataagatattctgaatcgacgcatcaatagacatacataaacaaaaataagcttgtatcccaagtcagttgcaaacggtgggatcgtcatatggcggggtcctctcccgaccgccacaacttcttctccccccaccaactccccttattctcccagctctcctttttttctgtatattcaaaaggtgcgccctgaaatttctgctttcttctcttcttgactgtctaactcaatcaactccagcgttattctctcagcttctttacagtcatcatgggcgagcactcagcaatctggcaaagtatgaatcaccttgcactgcagactgcagactgcagactgacaggtcggcccttgcttcttcgagttcgctaacatgagatttccctcgaaccaggctatgtcgacaccaggtacaccactgcccctcctcaaccccagatatattcctcaatgctaccatcgaaaccgaatcatctcacccgtgttatcctatacatatactgacaagcttcttttctcacagcctgatgggctcgtttcaattcgacaaggccggtattctcgccgctgatttctccggtgttgaggctgcctcgcccggcttcgcggtaagctcgcctattgttttccctcgtgcggggtggggtcacaggcttcgacacatccgctaacgttattggttgtcgaaatacagctctctcaagaggagatcaactccctgatcaccgcttacacttctagcgagaaggccttttcctctggcttctctgtctgcggtgagaagttcgtcaccatccgggctgacgagcgcagtctatatggcaagaaggtaagcatatcccttcgactcataaatacctcgggagttctatcaacgcataccactggaatctggtctaatctatttgatttgtgttacagggtaaggagggtgtcattattgcccgtgcctcctcttgcaccatcatcggccaccacggcgagaatgtccagactaccaacgcggcgaccgttgtcgagaacctcgttgattacctcaacaacccccggtaaattggaaaatattcaaggataactaaatgatgtgatgagttgaggggtttgtgaagaataggaaataaagcagcactcgactatttctcttttgaccccagcgtgtttttttcgcttatgcttcttttcttgctttgtgactggatctctttgcctcaatcggtcacgtcaatctagacatacctcccaatgcacagtatgaggatacgaaccagattgtatgaggcacgacgtaatttgtctattctaacatgcatattaactgattaccagccgcgctggaagatcaataagggtcattattaattacataaagcggaaggccgtagatggatcgtatcatccatgtatagcacagcgtacttgcacacaaacaaggtgatgtgcatccgatatccggtaagggtacatcgtgaaatccacatacacggagtctgggataccatcaaggaacctcattgtcgagtcgtggtttgtatatactcatacaggaagctcggcattgctcctcccaccagcaagcacctccagcccacgctggatatacggccctatcacagggatgttgcccgcaaattgaccgatggtgaccaggaagtcgccaaacaggatgaacaagccgtagagttctatcaaaaacccagtcaagggccagcggaagagaataaggaggataccagcggcgaaagcagcagtgcccttgagtttttgcgggcgcgtgaagaagaccgtggttttcctgacgccaataatcagagtcaatccgatgagaaagaggacctagcattgtcagttagatgtaacagttttgttagagcatgtggcacacatttcccatggcgagtctagttaacaggcattagcatttattctcccaaaaacgtgaaacttctggatagacatacaatgaccggtcaaagaacattaatactcctccaaataggaacaagcctcctaattagcaaaatgaattagttctcgggtccgagtaattagtgatttgggaaggtcgatctcgtaccggcggagcagaagatcacaccgatctctgttatataaattagcctatgctcgacaattgctacacatgtactgtcacggtagtgaacatcacagcttgtagagcgaatgcgactgactctggttctctgttaaccacatgctaggcatccttcttttatttcaggtccgactgttgatgatgatatatgggaccgaaggttgctcaaatatccgcgatgtacttttgtaggacacacgacacctatcactggtgtgcgaaacaaatgatctttgatggttgtagactcggtagggcgaaaccaggcagatgcggcagggacaaagcggatataccggtggcgtcgttcaaagtgggtaatagcgagtctaggtttgcagtatgctcacgacgtgcaatattctcgacacagatcaaggtagcaaaagtcccgaggcacgtaaacaagtcaaaaatcacaattctgccgcctaatcagcgccaagccgggaatggtaggcggtgactccaaagcgcttatatcgcgggctgatcattcccttcttcctttcccttagtcttctccaatttattggcaattgaacaaggtcattaatgatgtgatagtttcaattgcataggtttgtgacaatctcaattttcagttctaaatctactggtattgagatataccgaactgaaccacacaatattgagcacagctcatacatactgctactcgctattgcagaaccttcctctctatgtatttttgtacatgccacgccgcgacgacagtctcttcggattctgtaactggtgccctgttccatggggtgtcggtaatagtcgagtgcttctgcacaaggcgaagatcgactcattgatcacgaataagccggagcgttttcttgagcctgtctcgaaaggggcatggtggggtggaaaaggcttgactgtgttggtcgtacataacgcttattgacgattcgtatttttgtctatctcaattgattagtagtgctctgacaatccagattctttcttgtatgacatacccgttcttacatgatcgttcgtttgggaattgataaagtaagcaacggccgccttttacttcaaaatagtgtgcgccccgcgggcttccaggtagttttctggaacaccctgtgccagagtccggatcaccttataaatctccttgttgtgataccgcagccgggtcttggggtcggtgtaaggtccatccaggcccgtgatgtcgcagtagtgatgctggtaggcagggttgaacgatggtgcggattcgatgttcgtgtaggtgacagcaggaccggttgggaatgtcgcccgggcattcttctccaagacgagagtcgagaggttttgggtggcctgggacaggttgggtgctgccccttctgcgggggtttgtgtgccatcggtgagagcgcccgagttaccaggcgtagtttcgcccgaattgacttgagttgccagtactgaagcctccttccgagaggcctccgagataatctgcttcagattcttgttgcgccgctgggacggtttccagtgagggttgcggaagggcttggggacatgtgaaatgtctagagtgttcaacagctgctggtgagcttcatcgttggcaggagttggtggaggcatgatatggaatatgattcaggatctcaaacggataaggtcaggtccaacgtaagaagcaatgcaagtagtatccccggcccgcgaagtctgtatagccgcacgtgatctcatcccgattaagtccaaataaacacctgaacgtccaatacccacacacattactcaatattcagtcatggtacgcggtttctcttccctgtatcaattttgatgcgatctgaaagatcccagatgctgatctctccttaggaaagcccccacgagcatcagcagacggtgctgctctctcgcatcatcaccaacgtcgtatgtgattgaaccacgtctgcaagatatactctactcaactcatacataggagaagctcaatgaagccattatggtcatgaacaaaggtctccaggtaggttcaagcctctcattgatattatcatgttattgactctatcacaggaagtcaacatccagaacatgaacgttgagcttgtggcgcagatgtttaagaactaccagtctaatgttctcttccatcttgaaggtatatatgactatcatatatcagaaaacctctactaataccctctagctaccgagaacctccaagacccatcctaaggaattctgaggatggataatttcatgtaacgaggaaatgtatggacgagcttgcaattagtcaatgataccaacttctaaattcaataactaggcacatttaaatggttgtaatcgttgcatccctgtgctccgtactccgtaccagcgatagtgatagcgatagcctctattcttggcggtccaactccgccaaactcatcaaccgcgtgtgtgtcctctttgttaatccgctaccctttctgcggtttattagtttcctcatatccaaccttattcccatgcagtgagccctcttcgccatctacagatctccgaccccaatagctcctggtttctggagcgcagcccgccatgacgattacctctgtgcacaccctcctaccagctcgcattgcatccaatgcgagtgaaaaacgaaccgagaagcctcctccaaaactctacactgtacaagactttccattcaagggctaccaccctccgcaacccgagggataccagcagagcaaagcccatcccgacaccagtgctattgtcattgacaatggtaagggattccataactagagtttgtgattcaattctcctaacagatgtggtgcgcaggctcccacctcgtcaaggccggttggtcttttgacaaaaacccccgattcgctatacctcccgttatgagccgataccgtgatcgcaagctcaatcgccagtgccaatttatcggatacgatgcctacgtcgatgcgaccacgaggggacagctgcgcaatggctttgaccccggctccagtgttgtcggtaactgggatgtcatggaaggcgtgttggactatttgttcctcaagctgggcgtggacggcgcagatgggggcgtcggtcgcccgatcttgatgacggagccaatcgccaatatgccatattcaagaaagagttagtatcgggcggttttagggccagtatggctgttgttgacacacctccagtgatgaatgagatcctcttcgaatgctactccgcgccatcggtggcctacggtatcgattccctcttctcctatcgctataatggtggaacggatggtttgattgtggattcatcgcatacctctactcatgtgattccggttatgaactcgaaacccatgctctccaactgcactcgtctcaactggggtggcctgcagagcgccgaatacttgatgaagctcatgaaactgaaatacccgaccttcccgactcgtttgacagacgcacagatggaggaaatggttcatcagcactgttacgtctcacaagactacgagcgcgagttgagtgggttccttgactggaccgggctcgaggaccgcgaccgcgtcattcagtacccgttcacggaacacattattcaagagaagacagaagaagaactcgcgcggattgcggagcgcaagaaagagagtggccgtcgcttgcaagaacaggcggcaagaatgcggcttgagaaactagtgaagaaggagcaagagctggagtactggaaagatctgcaagagaccctagctaacgagaccaagaaggaaatccgtcgtatccttgaagccgaggatttgaaagacgaggcggcacttgaaaagttgattcgcgagctagagaaatctatcaaacgctcgcgcaacaaggatctaggcattgaagaaactgaggagcagccggaggaaatgacattccctatgctcgatatcccagatgaccaattggatgaggccggattgaaggaaaagcgacaccaacgtctcatgaaatctaacgtcgatgccagactacgtgccaaagaagagaaggagcgcgaaaaggctcgtattgaagcagaggagcgtctagaccgtgaggcgcgtgagaatgatttcgagaactggattgcaaagcgtcgcaacaatcgccaggtatcttggccaaacatgatatcctcgatttccgtgctaatatttctcagggcattctccaaagaatcaaagaccgtgaccgtttcacggccgatctcggaaatcgcaaatctctggccagtcagatgcgtatgaagacgctggccaacctggcatctgacggtcctaagaaacgccgtcgtggtggggatgacgatgacttcggtgccaatgatgaggactggggtgtttaccgcaccgtagctgttggcgagggtagtgacgatgaagaggaggaggatctcaacggtatgctcaactctgtagagaaggagcttctggagtacgaccccgaattcaccgagaacaacactttcgccgcacagtccgactggacgaagagtcttgtgcacgcgttccttcgcgggccctggcctttcgatccggaaagccagcgggaggcacaccagctccatctgaacgtggagcgcatccgtgtgcctgaggttgtgtttaagccgtccattgctggcctcgaccaagccggtttgatcgagattgcggccgatattattaaccaacgatattccaatccagcagaccagtcccttcttttgaaggatgtctttttgactggaggaaatacgttgtttaccggtttcgatgaacgcttccgtaaggaagtccgcgggttcctgcccatcgaagctacactgaatgtacgcaaggcatcggaccctgtcttcgatgcttggaagggcgcagcacagtgggcttctggtggtgacctaggccgatcctcggtcacgcggcaagagtacttggagaagggcagcgaatacatcaaggagcatgaactcggcaatgctacatggtgaggtttaaaaagcgcgttctaagaacgcctgtctgggcgcactggagtcgaatggttctgcttatccggcgtggtatattaggacatgtttatctaatacttcaaagattttattgcagaaaccggcggtagtaagcgaaatatgacatgttcagccctctgtatggttactttaactatgttaatagagccggtcttgccagagcatggggtagtagaggtgataagtataggctatctatgcatctcgatggcaagggacccggcgaacgtattcattccccaggtgagacacgctccttgcatttatcaatgagccatgtttaagatagctggtctagaagactgtcgatcatggcttatgcagggagaccccgctagtcaactattgaagctgcatattatagtcttgtttttctcatgtctcgatggttatgcaccggcggtgccattcactctttctcgctctgattggcacttgataagtacaacaccacaagcttaagcagacgttggattatcctccgcaaactgccgactggcttttgtttgtttggggttattctcgaagtcgccttctttatgtaaacctctaaatcgacctcacttatgtctttgcgtacgagaacatgacattgcccttaccacatgacctagatatcgacgtcgtataaaatagaactaaaatgaacttactgcacgatatagttcgaatagctacacaaatgaaaaggtaaacaaatcttcaactacctcttccgataacctgcagcagaaaccattccagattaggatatgggccagacatagtgacttcatccagatgccatcatgacgcacctggagagtttttgcttttcgtccttgctgaccctggccatggactgtggtgggtcttattgtattttatacctagcgtcagtcttgtttgtttgccttcgttcatgctaattccgagatataaagtccttctctttgctcatttgccatgaaggccaactcttttcccccctcgctgtatcgcgccccctttcacgttttatatacttcttggtccttatacaaacgatggtcttctcaacaaacatcgctcgtccactgcaactggctactcgcgccatgcagtggagtagcgctgtcattgtcatgggcctgacctcgttcttcatcaatcgtggtccccatggccagcatactatctaccaagaagtcattgtacgttattggcgctctatttgatcaaacagttttcacaaagccatggaatctaactgcaagcttaggctgtcctctcagtcgtcttcttcctcctggcttttatctcgccattcctaccctcgttgagcagattcgtgctcgctatcgacgtggtattctcctacctgtatgtcagcattcgatcatagtgtctgcatcgaagtctctaatatccattccagctggttgactgccttcatcttctccgcacaagactacagtacgagacggtgctactttgctattcccgcgggtctcagctgcaatagcaagagagccaatgaagctttcatcttcctagctttgtatggcctgaatgcccccagccgctatggataggtgaaaactaatatatcgcagtatcttcaccttctttggaatcttccttgaaaccgccgctctatgggcctatcgcaaggaaaacaccaccgaacgcagttatgaggataaagtccatattgagacccgtccacctcttgatgcgcctacagttcctgcagttcctgctggaactgtctaaccggtgtttcaactacttctctggataaatatgcatctactatctcttgttgacgttctcaatcgttgtggatatattatttactgggatgttcaggaaaccgtcttgtgcataataccttatatctggactctttgattcttccactagccttctcttttggttttatctcggtggacttggattttggcaggggccaaattgaacatatgtttctatgagcggggatgggagggtgaaattgatatctgatggacagtatcgcaggctcgggatacgaccttgcagtgtgctctctcccaataacttaatccattcattacttatactgtgaccgaaaccttcgggtgtccgatatggtgataccttttccctttcttaatcaacattacacgacatactgaagaggcctctcctatttcaggtttttcatgatgttctagccgaagggaaaacataaaggctaaacaataatggcctgattcgcataactgaagtaaaaatactggaagtaaatgtcatatgactgccagcaaagctgtatttctattttattgtctgactatttacaatataagtatacactgaatgtacaggttcgataaaagaagccacccaatcagtatcttacgcaataaagaaagtaagcaccaagcagcgcgaatcgtacgcagtcttgcataccggatacaaaaaaggtcaagtctttgcttaattggactcgacatatcacgcagagcttggttgaaggataaatgttggaacggttagatactagctcggcgaggagccatcgtccgctgcaacttgcgcttttcctcggtttcctccgtgataggcagtgagccctcgctcctcaagcggtcgaggaactcctttccatatgcatagccgacttggtagatctcgtcaaatttgccgaactctagggtaccatatgggtcgacaggaggacgcatgtatagacagccagtcgtattctttgcgcgctcgaggttgtcgaacgatgagacatacgccagtcgtgcttgtatttcggaaagtgtaggtgggttcgggagcgaggagaagggattccaccggttgaacactgaccagaatcctgacaatgagtctccgaatccctggggtgtggtgtcatcgatagatccaacatcaattgcgaagatagcatccgctccaagacttttcatgtgcgccactgtgagattgtcgatgtagccaccatccaggagcatactgccttcatcacagataggaggtatcaggccggccaatgtcatcgaagcccgaacgtaccgccagacgtaaccagacgagtgatactcaattcgggatcggctgatgttggttgtgttgcagtagaactccaaccagaaatcttcgatttggctatctccaaatgtcttgaagattccccggttgaactcatgacctgtggtgtaggaaacagtgggataggtcaaatccaatgcaaaccgccacatactccccatgcgcccggagaacttcttagctcgcccgtacataggaacaacatcagcgtcacgcgcgtaaagagcaccaatgaaagaaccaatcgacgtgccacctatgatatcaattgggatcccggcctcctcgagggctttaataactccaacatgcgcaatgccacgcgctccacctccgcccagtacaagacccacagacttgccgcataaacgccgagccagccgatggaaatcacccttgaaggaggtttgcggggaatagagtggagactgttgtgcacgccgggacgtatacttttggatttcggcttgcaaaatttgcacgcgctgcttcagcacagtaccgaacttcctagtcggcgggtgtgaaggctcggtggtcgagcgaaagcccatttgaatgtggtgatggccgccgttaatccacacccggttcttcagccattcccgagtcagtccaggtgcacagtaacgctctgcgtgcaaaagaactagttctttgcgagcagtggtcttcatgcctagcaggaagcgctcatattcaccaattctaggtgaagactcggcgaggcccaccaacaggatagagtcagcttgcgcaatgcaagtctgagtccacggtgcgttcacattggtgtcagcgatgtacaagaccattccgaatttctcttcgaggtcagccaggtattgagaaagcttaagcttccccatcttagtgaaggcgtggcgacccaagtggttcaaaattgtcgcttggttgagtgatgtgacacctctgggcacaccaatttggtgcaacgcctgcaagagtctatgtccaaattctacgaccgggacgccagaaatgatgggaagaattgccacggtgcgaagattgactgttgaggttgcagtctgaacactgccagtctgtccctgttcaatcttcttttcggccagcggatgctcgactaaatcacgcattcgctgggcaataagtttagagacctgcatggtaattccaggatgttcctgagcgagactgttgaaaagagaccgggggaacttggctagttccgtttcccggatagcatgcaaggtagacggtcttgtagattcagtcatgacctcgagttcgccaacactctcgccctggccgtgttcaccaatgacggttatcttgccgtttgatccctcaaggacagacctcaggcgaccgttcagaacaagataaatagcatcgctttcatccccttggtggtaaatcacctgccctgcgctgacctgcacccactccagcgcgaaatcaatgtggagcagcaaacggggcagcagaattgtcaaccgctttgctagcgttaacagagcagttggatgtctatctgcgattctctcaagggaagcacggggaaggaatccaacgtaaacatctgtcttggcgacaacatcggtgtacgagcggtacgatgcaagagcacctacatacccttgaatgccaccaggtttgatcaggtatagcgatttgcgggactgagtctttcgtcgagggtcattgctgcccgctgcaccagcgcgcgacgatgatgtcgttgttcgtctcagcttcgggaacagctcctcttgcgcttgcgagccagatacatgagaggccccaataagggtgtcattatgttcattcgccggaatacccacgtccaagaatccgtcaatgacgtagtagaggcctggatggcgctcacccttttccactaaaaccgagccttggggaaagtaaactacttcaatgtcatgtcggaggtcttcccgtaggttgatgacaggcgaagtcccccctgcacttgtcactgacatggaggacatcatggattcagtttcgccgtcacctgacgcttcatagggatcgatgaagccaaaggcattggagaacacagccttctggcggcggttatcgtaggagagtagtctcggcgacgcatcaccagagtggctgctcttgcgcagagcatcgcgtgtgccttcggtgagcccaatgcccttcatgatacagtccaggatcgactcgcggaaaatagcgtcctcgtcaactgactcttttagctggaaagtcgagggtagaccattcattgcagctgtggatacaaattgaggttgctcccgctcagtaagaggagtctggaggcgaggtgccaaattttcatgtcgcggtccaaaccgggacaattgtattgtcgatagcaaatcaccggggctaacacttgccgagtccctgtcaatgaatggtgacgacctttgttggctatggagtgtgaggggacgctcacttgacacctttgcttgtaaaaaggcttcttttctgagagtactgctcgagcgtcctctacggcccacagaaggattgtgaagagcaatgccttttccgatttcctctggtcccaatcgatctcgctctcgtgtgaacttgtccttcagacgatccaaggcactccctcgaagattattcggaaggtcccaagaggtgaatttagacatttgccgctctatgcctaaaacctcgctagtcaggcccagataagaatgcgctgtagcaaacgttacccgctggagacgtgtcaggataacctggacaatgtgtgacgttgcccgtgggtagactctggtcaggcggcggaatgcgctggcagggatgatagcaatcgtcgtgtctactgtagctcgtgccacaatatctgggtgtaccgacttgcggctttttttctgggcattgtgtttagtctccgaatgtggggaatgtctgtggttctgccggggcatggtatggctctctccgagattcagcggaggcactggtggcaatatattgccagatccaagggatgcagtgttcaaattcccggcctctctcacggtggacccgggactgacagcaaaggtatcaggcacatgagtctggccaaggctaggactggatatactggagctgtgacttcgggagttacgaagctcaatgtcttcggtaaacagctggagaatagagaataaagacgacattgaagcgccgttcttgacttcagtgaggagctgatagccctgtcggttgtgaatgttccggtcctcctcgtctgaagaggcatcatcgtccatatagatattctctcgcgaacctgacttcccttcgcgtgctgatttcacgaagatctggaccagcccatccacaaccatgcagaagcccttctcctcctccagcatgagcgtctctcccgcaatcagcttcctagtttgcatcgtccgggtaagttcgtggaacacgggccgttcaaggtacccaaagactttgatagcactgaggaattcatccagatagttggcaagtcctggtttcgagtccccttcctggatatcagggaacaaatcgacctgggcttctttgcgttgaggctccgggggcaggcgactgtacgtgttcaggtaccggtaacggatgaaccagctgagggtcgatacaatggcaaggaagattaacattctaagggtcatgaatggtcagcaacggtcaagaatgaagttagcaagaccaagacctacatggtggtgaaattcatagtgaacgtcaagctcatagagaaaagcgtaaagagccatgtggggagtgtaattgtcgcgaatgtgattatcgagtagagaaggcttgggagggtgtgaaatactagggtaaacacccatccgatccaccccatcatggttaagggagctggaggggactgcgggggttgagagaaataggcgctagaagcgagggaattaattgaggttgaagttgcagccgttaggctgagggcgagggacggggccaggccagccatgttaaacacatgcaagattggagagctccgctttgtgttccacctgggcaggtttgaggtcgagactaactcagattgacctagaccaattcggagttgaacccaaccgtgggcccattaggccagaagattgaaagcatcgtactttatacagagtgaagtggtaggtgggatatggatgggaggggagagggaggttcctagttcccaagtcacctgctttacgtttaaaggcggaatgtgagattcgcatttgtatcagtttatgatttcaactcatgataatattctgttagcctattctgttccaattaatattctaatgttattattttatgatcctatgatcctatgatcctatgattccaaaatatcccggttataacaggccaatccacagtgatgtaattgtttacaacatcaggccttacacacgcaggtaacaacacaacttcaatttgatatatgttgatacttggaatgcgagcagatctgaaacataaaatgtataaattagagaagttgtagatcccattggtgtgttctacatagccctttcacgcaagctgtacagcaaatatatatgcaacgttacagtctcaaacccccgatacaactagaaataagaacaagctaaataaaaagcactgggcttagttcgactgcgaataaaaatacatagattaataaaaaaatatactaatcttcatgaattcaagtctccaacatggcaaaaaaagtagagacagcccaagttgaccttccacatggcaagtttccgccttggctacgcttccaaccttggaaaccaatgctccccctcacttccttttgcggattgctattcttcttgtttttggtaaacacccttgccagtggtcttgcgtttctagattctgttgtcgtctgggttctcagaaccgcggcaatgtttcaggtacctattcgccctttcgatgatgtgtgcgccttgtgttctcactaacaccgtcacagcgcctccgcgacgccatcgactctcgcattgcagaggaacaagcacgtcaaaagtccgcccaagataacatcgaacgctccaattccgctcgccgtccgcccggacgtaaccagtccccgagtcggcgcgcccgtcctagacgcaacaccggtacccccgttcgagggcccgaccccaaggagttcgaagctgaattcaccatcggtgacgatgaatccatcaggtccggtactccccgagcagatacaccagagcctgcttcggaagtaagcgcccctaacgagggagagagccaaatggccgaaggcaaaccggcggagacgcccgagaaagagacaggagagacggagaccaaggaggcacctgctgtgcttccacctgatgttcgcgcgaaattgcggcgacttgataagctggagtcccgataccatggtatgtacctgcctgactagactacagggcacacgactaactgaacgtattagaattgctcaaggcttaccgtaccgcccactcgcgagtcctatccattgaacccttcgaagctgctttgcgcgagaacacccccctcacctcgattggcgaacccaaagctttcacggaatacctcaaccaatcaaccctgaaaagcgatatggtcatggatgagctgaagcgcgtcaccgaagaaagagaagacttcaggaagaagtttgaagaagcgcagcaggctaccaaggaggctttggatgagcttactggcctcaaaaaggagaaaccccagacggagacacccatagggacagacggaacaggggagcaagctagtgaagagttcttttcgtttgataatgaagttccccgattggaaggcgaacttaaggagaagaaagaagaggttgagaacctcaaaaccgaggtcgaaaagctcaagcgcgatatgtctgtcacccgcgagtcgaccgaaggtatggtgcagaatttggagacagccacccgcgagctcgtcgagctgcgggaaaccaaggacaatctagatgctgagatcaagactctacaaacctctaagaaggccgatgtcgatgacctcaaggcgaagctagcaactgcggaatcctctctcaaatcaaccacattggaggtcgagaagttcaagtcgcagctcaaggagaagagcgaggaaatcgacaagctccagaaacaagcctccgaaagaactgagtctgattcgaccctcgctgctgagttggagacgaccaaagaggaaaagaaatccgacgagaaaaagctcgttgtgctccagggcttagttgacagtctccgatctcagcttaaagataccgaatctaccgtgttacaattgaagactgagatcgacgagaggtgcgaacattctgccaaactacaagacatttttgatcttgtggatgagaacttgaaagagaacaaggcgtgggtatctaccaaggagaaggttttcgttggagagttagccgacttcaatgaggttatcaagaccctggtgccggtcaaggaagagcccaattctactgtctctgctcctgtcactaccgaaggagagacacaacctgctcaagctactggtggtggcagcagtggaggaaagaagaagaacaataagaagaagaagaagggtggtaaagcagaggaaccttctaagtcgactgatgcagcccctgcagagcaaccgcccccagaggcgccttccacagctaccaaagagctggatgaactcaagcaaaagatcgaatctctcaccctgcaattatccgaaaaggaggccgctatcgaccgtctcagttccaagctaaaaagcgaggacaatctgaaggaagaaattgagtccctgcgcgatgaccttatcaatatcggccaggggcatgtggcagcgaaggacaagatcaaggatctttcagaagaaaggacctctcttcaagaaaccatcagcaagctcgagaaagaattggcggaactccgcaccagcaacgcttcgacctcagctgattcggcgaaggtgcatacttcactcaaagaggaattcgataacctcaaggtccgctctgttaccttggagaccgatctttctgccgctcagcagctggctgctactcggttcaaagaccttacagacctccgtgaaactcttcagaaggttcagcccgagctgcgcagcctacgtgctgagtcttcggagttgaagaccctaaaggagaccctcgccagcaagaattccgacctgaaggtcctcgaaggcaagcatgagaatctgtgcgctgagctgaagacatttaagtcgagaatctcagagcgtgacgcagaagtgggcaccctcactaagaagatccgacaggagaccgacagccgattgaaggcggaggagtatcttactgttgtccaatccaatctacgctctgctgagggcaaaaagcaagatgccatcaatgccagagacagaactgctgccgaactctccaagacccaggacggtttgaagaatactcgcgccaagatgcgggagatggatgaacatatatctcagctgaataaggagctcggaagcctccgagaagagatccagctaaagacagctcagtacactagtgcccagagcttgatgaacagtatgcgtgatcagacgacggaagttgcaatgcaaatgaaggaggctcgtgagcgatgcgagagcttggatgaagaattggccgacgcccaccgtctgctgagcgaacgaacccgcgaaggcgagaccatgcgccgtctgctcaatgatatcgagggtcgttcagaggctaaggtgcgagacttcaaggaacgcatggaggctgctgtcgaagagcgagaccgtgccgaagatgaagccagcactcaaggtcgacgccgtgctcgcgagatggaagaactcaaggctaaggtccgtgaagccgagcgcgccctccgcacggtggaacaggacaaggaggagcttgaacaatcccaaaaggactggcgccgccgtcgtgacgagctcgagtcagtatctgagaagtcatcacaggaagtggcagagattcgacaggccatggccggtctacgcgatgctctcgacgaaagtgagaagcaagttcgcgacctcgaaaaggacaaggcagagcttcgtcgttcagtggaagagacaaacagccgactggagaagctccgaagatcccacaagacgctaggagaggacgtccgcctacgtggctccccgtccggtcgaccatcctcgcgatcatctacggattcaggctctcgtcgggccgtcgtatctcctggcagaagcgagactcctcttggaccacccagtaatgcatctattgactacatgtacttgaagaatgtccttctccaatttttggaacagagggacaagaactatcagaagcagctaatccctgttctaggaatgctgctccatttcgatcggtgagttttttactgaaccttctctttacaatggtcactaacaaacatagaaacgatgagcaaaagtggatgtcggccatcatgtccaaataattggcgtttatacccatgggcgttgattgctatctgagtcccctgctctgtacaatatcattctgtagagataataatatgtttccgctatcagaccatacccctttgcctatgaagacaacgttcagatatccttatccaacatctagttagaagagctcggtaatattacctaatccggtatagtaaaatcctggggttatcgcgaagcttcgccaaaacaagcgacgcgcatatactagcgagtacaaaagtccgagagaagcaaataaaaaacagctaagctctgtaattcgtcatggattatcttcgtcctctttccaacgccatggccgaccaacccaccattcgtctcgcgacgcccgagggcaagtgcattgaccccaaagcttctgagtagctccccaattaacatcaactagatgtccccttgatcctccaattcatctgtgaactagccgactatgaaaaagccctccatgaagttgaagctaccgaagaatccctcctagcaactctctccttccctggtaccccgcccaggcgcggggcggtctatacagctctcattaccccgccggctactgccgacacaccgaacccgatccccgtcggcatggccttgtacttttacaactactcaacatggagatctgcccccggtatctacctcgaggatctgtatgtgcagcctagcgcgcggggtaacgggtacggcttcaagttgctcaagtaccttgccaagcaggtgctggaggcatcgggtcggcgattggagtggagcgtgctcacgtggaacgagcctagtattaggttctatgagcaggttggtgcgcgcggtatggacgagtggatgaagatgatggttgaaggggatgcgttgactcgtttggcggaggatgtgtagagggatgcatgggtgctaggcgggatagggctgggttgtcttttttttatactacgaaaggcactgggaacggatcagagtggtttatttatattgtagaagctcattgcagatcgagaacaaaagtgggctggttatgcgtgcatgtttagcaaatatctatgatcacagctacatatggctcaatgtcatattttcgaaaaaagaaatttatatcgaagtattagaatccaaatctcacgtcattgatgtaattgaatacaaataacatccaagttgggctgtgaggtagatctaggggcgaagccttttagcgccaggtgacggcattgacccgcagatcgcctcgatttgccctgttccactttctcttcttccttcaacaccctcagcgatggcgacaactccagaaaatgcccaggagtataacttccatgtggactatgttatccgttacagcttcggagacgtaggtgagtaaaagagagctctagcatgtgtcgcggggcacattctaacaattgcagaccgatcgcaggcaattgagcagctcgaaaaattgctccaagcactggccctagttggtttacaggtcgaggtacgacagggtgatgagtcgtctctgctcgtctttgctcgagcttcggaaaaccggctgaaacgggcggtctaccggtcgcggtgagtgatgatgcatgtcgttctatgccaatgtgctaatctcgactttgaatatccacagagtacgcgactggctatatggcattcgcaatgatgagcccacaccttccaactcgaccgagccgcagaccgaggctgagcgcctgcgagtgatccaccagatgattacacttcccaaggaagagggcggtgccgccattacccccaagtatggcgactggaagaatgtcactgctatattccccattcatgatgtcgatacaaataaaaagtggatacgagactggagctcaaagactttcctctccgatgacgacttggatcagatccggaacaagtttggagaaagtgtatgtacagcgaagttgttcttctttgtcctggctaacatatgaggcaggttggattttacttctcgttcctacagtgttacttccgatttttgattttcccagcagtcttcggattctcctgttggttcctgctcggcggatattcgattatttatactgtcgtcaattgtctttggtgtatcatctttgtggaatactggaagcgccaggaagttgatttgagctgcagatggcaaaccaagaacgtctcagctgttcggaccaagcgacgagagttcaaggcagaaacagaggcctacgatgagggtaccggtgagatgcgcggtgtcttcccggcaactaagcgcatgcaacgacagctacttcaaatcccgttcgccttgcttgcagcaattgctttaggtgctatcatagcgacttgctttgccattgagatcttcatctcagagctctacaatggtcctttgaagacatacttggtatggtgatccttcccatttcctgtgaccaaagcttacccttcagattttcatcccaaccatccttgtgtcagcgcttgtgccaaccatgagcgccatcttgacgtctatcgcaacgaaacttaatgattacgagaaccatgagacaagtgacgcctatgatgttgcattgacccagaaggtctttgttatcaacttcatcacgtcttacatgccaatttttctgacggcctttgtttacgtgccctttgctagccgaattgtcccctacctcgatgtcttccgcttgacagttcggcctttcgtgtcgaaggaacatgccatctcaaagcgatcgaatttccaaatcgacccagctcgcctgcgaaaccaggtcgtctacttcactgtcacggctcagattgttggttttgcaatggaaactattgtgccgtatatcaaacagcatgcactccgcaaatacaaaaagtacaacaaggagcgcaatggtaagatgaacggaaacggcgacaaagaatcgcctgaaagacccgtcgtgtctttcgatgatccggtcgatgaagtgcagttcctcacgcgtgtgcgcaacgaggtcgagcttcccgagtacgatgtgaccgatgatctacgtgagatgtgtattcaatttggatacctggcccttttctcacccacatggccgcttgttcccctttcgttctttgtgaacaactggattgagttgcgatccgatttctttaagatttgcatggagttccgcaggcctgtcccatcgcggactgacacgattggaccttggctcgatagtctgggattcctatcttgggtcggtagtatcaccagtgctgcactgctgtacatgttcagtggcaacacgcagcacgggcccaatggtgagccgacagatatcaaaggctgggccctgcttttgacaatcttcttttccgagcacctgtatcttattgtgcggtatgctgtgcgggctggtatggctaggattgagccccccaattcccgcaaagagcgggctgatcgttacctcatgcgcaaacgctaccttcagtcgacaaccaatgcggaggtggacgagaaaaacgatgaggatgatatcacatatatggttcagccaactgacgtctcacgcacgtctcttgaagatgatgctcggcgtgcgtcctcgcatggcgccgacccggacaaccgtttctggttgcaccagcggggctggatggagtcggcgaagatcggagctgggatcatacaggcacagcctagcaacgatagcgcgaagaagcaacaatagtgcttcggagttggacagagtcaggatgtggaggcaggggcttgagaggcctatgttatggggtgggatacgagatcacgagactatatacgttcaacttagtacgcgatgtgcaggtacatagtaattaccgatatacgttcgatctactttttaagctgtcctaaatggaatgattgtccagtggctggtgcctcaggcagaaatgtcggagtacgtggtgactatgatgtcatgttgacttggtcggaaacaagtaaacccgttccgataccggatatgggcggcatgtggtcagcagtagaacgaatcgtcgacatgtccatgggtacgacgagatcatgcaattggatgaatgtgacgagctacatagtacatatcatgaggttgttgttaaacccaatcatagccaacatgtggtatcaaaaccagtttagcggcaaaaaagtgtcgagataaactctggggtaggagccaccgcctcactcaccgcctactcaatgcgacatcttcgcttaccaactccttacataaatcgacgatcgccccaaatcctctgactcagaatccttaagtaatcctcctcctcctccagggcccgccatcaacttgcttacagcatcggatctgtaactgcttacctcattttagctgtattttgtgttcagcaaagcagctctctttgctctcaattcttttggaaactaaagtgccgtgcaaagtcactgcccaataccctctcgaatcccctttctgcttaatcaatgcaacctgcactggcgccagcgccgcatccaagcatgcagacttctgctcaggtaagcaggtcatcttgaacgcgtttgtcatcagatctatatgacttcctcgatgctttggatacaagacacttatgtcgcgttaccaaaatgtcgggacgacgtttcgacgcgtcgggtctccctgcagtcttgccacgtcaccttggtgcttcgttttgttatttgctactgtccatgctaacatatgactgtaggaccatgcggatcagggtacgtgattatagtttagagctttattgatgtttaattgccattacttttgggggattcaaggattcgcggttttctgggttgaaaataccctaccccgatcttctacttcatctcacctaggaaaattagggctgcgcgtcgcacatgattgttccccattgctgacatgatcttatagtcctccatgaccagcttttggctgctcagcaccacctaggcggtcgtccgcagggtgctccaggccaacaacaacacttgcaacccaacaatgctagcccgcgcgaccagccaaacattgaccctgccatctcgggtgccatgctcggcgctccccaaactcccacccaaccccagggctctcccccatctgacggcggctccaagagctatgggaagcgtgagctgtccacttctaagcgtgctgcccagaaccgtgccgctcaggtatgtcctttagatatcgtacacagagtactctgctaatcatcagaatagcgcgcattccgccagcgcaaggaaacctacattcgcaaactcgaggaagaagtgaagaacatcgaccccctcaaggagcaggtcaagtccctggtgggcgagaactaccagctgcgtgaatatatcatcaacttgcaatcgcgtcttctcgaagcccagggtgaagtccccgagctgcctgccaacatagatttgagccagcctcgcaccactgagatggcgcttgcttctgccggaattcagaactctagccctccagggtcggtgcccaccccgggtgcacaaggccagcactcttctgtctccgatgacatgaactctctgaaccgcatcgctgcggcaactcttggaatgcgtaagcaccctgatgacacggccttcctcaacaacaacagcttccagcagaataagcgggtgcgcacagatgatagccaggacggaaatgacggcgtgaacaagcaggagattccgcacggtcttcctatggtcaactgatcgccatgccgttttaatgcgtcttgattgcctacgttctgcgatcacctttcgatacccgcgtctgtgtcttttgtttgcttctgtcttattcagcttcggtgttacgttatgcttgacgacgacacttgccatatttctatctcgcctgttctgctggatctcctgtgcctttctactttaccgttatgtcacgtcccccctttgcgtaacggtgtgtggcgcagcgagtgattccatcctcttgatttcgaatacgtgattgggtggtgttttgagatttgttaccttcattgtggcagattgatggggagtttattattattaccgcatttgtttcatacttcaatttgatctatctgcttaattgcttaatggatggtcacaagacgcggatacccatacctaccccagcggactttcgctgcctcgtgggcgatttctatagcactcctttgatgaggactttataatgtcgcccagcgtcaagcttgctgggcaacttagtccggtctgaggcttttgagctgctccgtgctatcgggtttatgtgggctgtactccgtagtatactaatattcttcggcgttttcaggccttgtctaaattaattctttggaatgaagtgaataatcatacccatagactagagatttagtgacacctttatggagagatgagatccgatattaaggtaatcaaagcgagaggtgtggctacatgtccgttctcacaggcgaagaagtcggttcacttccagtaaatccgttcacttatatatacacttatacatgatccgtgaatctactgcaaaaagcatgacagcattggcctcatacgatatgtagtacttgtatacttttagtgcttcgaacaccttcagtctgggagaagtctagttggatatttcactgcgaaaaactgtcatgcttatctatttgtgtccctgcgttggatatgaattctcgtggccagtccagattattgaacaaccttgtcttaccaataccgtagtatctatcacttactgtttatcgaggtcatattccttgataaggatatcagcacaagtaataccagtcacgtaagcagtagcctgggtgtggttattagtgaggacaggaacaacactcatatcagcaacgcggaggttctccatgtcccgaacacggaaacgcgtgtcaacagcagcatcactggcaccagtcttgcccatcttcaccgtgccagtcatgtgccagctggaacagagcgtgttcttccagaactcgaggatgtcctcgtcggaatcagacgcaggccccatcagcgttgagatagtgtccttcgcaaagcactcctgtctactgacatcgagcaggtgccgataaatttcgatacaagcgcgacgatcgtatggatgtccgaggaaccgcgggtcgaacagcagcgggatgtctgggtcagaggactgcaggtgcacttcgccgcgggattgttcgtttatcatgaatgctacaagacagctatagctgtaatctttgaacatttcgggcttcatgcaatggaggggcatgtgggtggctatctcgtagtgggggatggtttcgcggttcaggaactcttgcacggatgttggaagcgctttgaattcgggcgaggcggtgatacggtctgatttaaaccagccggtgccgatctggcagcagtatcggttccataggccggtgttgtcgtgaagccactctttcattgcagcctccatggcggcgggatctttaaagaaggaattgcggtcatttgtctcagggttacgggcaagaaccagaggaaccaagtagtggtctcggagaccctggccaatggcgggcagatcgttgaccactgaaatgttgaacttctcaagctctttagccggtccgattccagagtgcattagaatctttggggtgtcgagtgtgcctgcagaaagaataacatctcgagaagcgaagtctgtaatccatgtcagacgaagtgcatagtaagagttcagaataaaatatacactttgtgccctgagcctctactccaacggcctttttgccttccaacaagacccgctgtactgggctgtctgtgacaacgacaagattatgaggaacattttcaaacatatcaacagccgtggtacgctctcccttccaagcagaattgattgttgcagccatgccaaggggattgccggagttgtgatccaagttgagcttgtgtccagccgcttcgaatgcatccagcgtgggtgccaagtccctttcccaatcctgggcatacccgacgcgcaagggacccgagtggccgtggtcggaagcaaccgaacggacatatttctgattttttggaagtacacgaccatcgaaggtctccaaattcttgtagcggatatgcatctccttccatccgaaggtatcgtcatccacctcagatgcccactcatcgtagtcatcccgcgcgcctatagcaaagaccccgaagttgattgccgagctacctcccagaccctttccacgggaatagtcgccatcgtgcccattgcaatattcctgtggtgtggtcctgtacccccagttcatgcttggttccctcaatgtcgtccaacgctttccattcactcgcaaagctttgtcatcattgcgcccacctgcttcaagaagtagaactttaggtctttgggctgatttggcgagccccgcagccacggtgcaaccagctgggccacctgttcaatgatgagcatgagagattgcaggtgtgtatagtgcacgattacctccgacgatgacaaagtcgtatgtgtttttagattccatgttgaaggtagctttctagagtcaagaatttgtcaagagcaatcgtgaagaacctatttagatggggtcagtggcaacacgtcaagtatatgtcatatcttctttctggcatgtttatgccattattccgtctttgcgtgcattaacagtaagccaacatgtgaaaaatagtacagcgtattaccactaggccacaataattggtcttggtctaaaggcggctatatctgttctgtttcttgtctgacaccacacactcaacatgacgggttgtactcggtacaccttggaagaacccaacaatagatggggcaaggaaatatacacccccaggtttaagagggctagcgtcgagactgcaatcctcacaggatattgcatttgtttatttacgacacggctaaatgggcccttgagtccaggaggttcgttagtcaggtcaattttgcaggggttgtaaatgtagatcctatggcgaaggatgcatagcaaattgaggctaattcattagtgtaacaccagaacaaggctgcaacatggtattaaccaagggcatttaaacaaactctttgtcgcacagcatggctcgaatggtaatcaccgggatcaaatccatggtattgattctcgaatccagtacctttcaacacttgcactgttgcgaagtctgcagcaagcccgatttcacgttgctaaaagatagtataaagtgtcgcaagatatcccaaaatagaaaacaataagactcaagccggggatccacattaactaggatatcgattttcccaaagctaggaggtttcgcttgaaagtgagcagtcgtttcttcagacaaagcaagtcatatcggacgcgtaacataggcccgtgcggttatatctgcaacgggaagatctgacgggccgaagacgcatacgcatattgtgcgctctgcgcgctgtgcatacgaaatatcctttcatgccgattgaaccatggagtatgagtattactagttacggagtacgaggaaaatcaggtttaagtcatcaatgtcacgagaccgtagaccgacgcgcacggtccctcatgttgttttgggtctggatcctccgcaagaaaactgaccaatcgcagctgagagcctccttccccactccagtagtcgcggaggttagcgcaaagaagattcgtcctcggcaattgagacatgtcggttccttatggagggcgaaagtatattgtacatactccggatatagacggcgccactctagccacccgagccactcgagccacctgaggttgttaatttcaatggggaagaaaaagagagtagaccaaaagctgagatttgaaatcggaaatgatcgtctagttctattgtgtagatcccatttaattcccagtcactaaaattggaacgaaaaagcccaaaagttcacgtgtggcggttccaagggttccctttctcggcttagcttggcataggggcaaacctttatgctggggatagctctggagttttctttcctcctgtctactcatactattctcattattataatataacggcattgctggacgttcgcttagcttcaatttccgccttgagtcttcgacctcgtcatcggaaacttctttgaaacttccaagttacatccgccattcttcggcaaacgaaatcgcgatcagagcctcccacagatctcaatctcctcaggcccaaaccctcgatccctttcattcggcattgacctcgttggcgcaaatggtctgctcggactagcaaaactatgatggctataccggggttctcaccaagcggggcatgaaacattttctggtctttccaataccaacattgaatatatctcccacccaggctggttgagtcggcgaccatgacagacctatcacaataccccgacggcctgcatggttaccgtagccataaattggcggtgcggacattgatgattgtctttacctccatcgcattctataacgccatcgaattgctcatattgttatttttcaccttcactcgttatcgcggactctacttttggacgcttttgctctcggtagtcctcggagtgatccctcacgccgttggccatctcctcgcgtttttttcactggccccattatggctctcgttgactctctccactattggcttctacgtcatggtcccaggtcaatcgctggtgctatactctcgccttcatttggtggtcaataacaacaacgtgcttcggtttgttctttggctgattatcatcgacgcgatcattctcttgatcccaacgactattcttacctactctaccgcacacattgcaaatccggcaattattcggggatacaatgtcatggagcggatgcaactggcctggttctgcgcccaagagattgtcatttcgggaatttacatcatcgagaccgcgaagctactcagaatgatgccagacaaggaccggcgccggtccagaatcctatatgagttgctggctatcaatttcgtcattatattgctcgatatttgtttactcctcgtggaatacattgggttttactcgttacagaccactttgaaggccatggtttacagcatcaagttgaagctcgagttcggtgtgctcggaaagctagtcgatcttgtgcacaatcatcgatcgcaacccacttcgtccgaacacgaagaataccctggcttcgtcgatccttcccagattacaacggatgtcacccatgcagccccacgggaattgcgaccggggggacggagaggctggaatacaatatctgtggagagcttgcccaattctgagcgcgacactcgtccatctacccagtcgactggcaagagcctgcatccatcttgaggttggactagtgatcaattgtctaccactcagaccaatggtcgaaataaaacgaaatcaagcaggagcaggccgtggttgcttactccaaccgcctttctgcttttacgtatggcgatgggtgatggtatcttcgtttgcttttcacaagaaaagtacctcgacaaatcttcgaaagcaacccatgatcccgcccattggaattaaaattccctggtttcatcacgcttgcgcagcgagccgttttcgcacctccggcgcatcaatcaaatgcccatcgttccttacatcccagcgagattcgaacagccttgctgtcaattcctactgaatgtacgatatacctgtctatccaaaattcctccaggtccaccataggcctgcattgtttatatgtgccagatttatattggcaacaataattatttaacgccacgtccacgatttgttgattttcagccttatgatgtaattacttcaatgaaatattacgtcgccatgacatctcatcagacaccaaaaccagttggcaaatttttaaatttagacaaaagcgtctctttgtagtcaatgcagcatggaaaccaccgtctcgatttaccacggcccgtacgagtccatccctgacaacgcttcaccaggccttaaatttctaaaacgattcctaccagcactagactccctaacccccggcgaaaatgtgatcagccctttcttcacatccagcgcccccatcctcatcgccagcgatccaccaacaaccgcaagccaagcagtccctatcctcgaagtgcgcagccgacatacctccaaattccaccaccatgttgatctcgcctgggatatagaccttcgaggtgacacaggccccatcaatacgtcgtacagcaggactgctccaaacgcggacgccgcccaaaaaggacagctctatgctccgctagtagggaacatacagatgaagcgcacggttatgtttgaagcgacatcggaaacaaccttcagggaggatccctgccagttcgcagttcgagtccgtgagttcaacatcctcgacttggaaggccgcgacgagtcggatctgcagattgttgagatgcgtatctttttggaccagagacctctccaggctcattctgcgagtctattcacgggctccggctattccggatcttaggctggagtactccgtatacgtagattggataaatgtaatgaaatttcatggatcgatgtgcttggcttctccactgcggaatcatctactaagccccaagttgaaccaacccccgcgcccccacttggaatgcttccatgtctttcttatctttggagatcatattcggcaagggattcctttcctggcggctttttgcctctttgccttataaggttgcattgcccagtgccggaagttgtagacgattcaaaaattttcacgagttaacaagacaagatgttggcagcacagaaacaagcagagatcatccacaatgtctctggggctttggataagtatgaatccaagctcagtgagatcaatctgaaggcgtgtatgatataggcaagcatattaaggctttattaacgatctatagatctggtccaaccccgaactttcattcagagagtatagcgcccacgacaacatctgcgaacttttcgagtcactcggggatggatacaaggttaacagaaaagcgtatggaattgaaacggcatttgaagtgatccatagccacggccagggtggacgtaccgttgccttcaacgcagaatacgatgcccttcccggcatgggacatgcatgcggacacaatctgatcgctacaagttcgatcgcggctttcctggccacgtgcgaaacaatgcgtagtctgtactccgatggaattggctattcggttcggcttctggggactccagccgaagagggtggtggtggaaagctgctcctcatcgacgcgggagcatacaaagatgtggacgcgtgcttcatggtgcatccattccccgtgcttcccggcgcctctgatcttctaagcgcgagttgctgcaccgggctgtatcttgcaaacgacaaggtgaaggtgacgttcacgggcaagccggcgcatgcgtcggctgctccgtggaagggtatcaatgcgctagatgctgtggtgtctgcgtatgtgaacatttcaatgctgcgacagcagatcttgccgacgcaaaagattcatggggttatttcgcgaggcggtgatagaccgaatgttattcctgcctctgcgacggttgaatactatattcgatcggagactgcgaagacattgaaaccattgaccgagagggtgctgaaatgctttgaggctgctgcgattgctactggctgcacggtggaatacgaatggtatgagaattggcgatggtctattttgatacgcttcgctaacgcatctgtcagggaggcctcgtacaaggacatgaagagcaataagcccatctgtgacagctacgtctctgctatgaatgctatgggccacaaaactatcttcgatgccgcgcagcaggcaggggggcttagtggagggtcaaccgatatgggtgagtgttccagatcctcacagtttgacctgaggctgagccactccaatctaggcaacgtttcatacgaagtacctggcttccacggtggattcttcattcacgccgatggagttaaccatacgccgcaatttaccgccggagccggatccgaggatgggttcaagcgtagtttgcaatgtgcagcggggatggctgtggtggcgtgtagagccttggtcgatgcaagtttcgccactgccatcaagtcggactttgagaagagtctggaattgtaaatactagcttgcatttagcgttctctcgtatttcttgtgggatctttcgaaattcaagtacaagggtatgacccgtgctcattgacaacttaccctatttgtacaatgacgattcggcaattgtcgcagatagagtgtgtgccgatcgacagtggatacaactgccggacttggcctccactgagggggaagcggatgttcccccaaattgcctccgtcatgactttgacaccatgaaagtggggtgccgaggaagatttattcttcgcggattaacttcgcggggaaattccggtaacctcttaccaacgccgagaccgactgcaagtgtataaaatcctcctttggtgtgagaagtgttgcaatctcggttgcgatcggtcaccgtcggccatcagccacgggcacagggcttgatgctgccggctgagtcttccctaatccgtcgatagtcttggctgatcccatacttcttttgaatctatccaaacccccggaaatggatccaacgcgattcgcccataatgtacctgttctatttctgtatcgctatgcgaggagagaactgcatcgactagccgataattcgtattctaaacatccacaggcctggcgaatgtgataccggtggttcgtttgcctctcactaaacccgtggacgctccgatggcttgagaaaacaaagagaaccgctcgtgtccgtccactgtcactttatctcgcacttcatttcattttttgtttattattcccttcctctgtgcatgttctggacctcggcgaacaccgaccctattttccccctctttcgaataattccccctatcagatatccaagaggcggtcatagctttgacggatatgacgagtctctttgttatagctgcatgatctgttttctatatgcagaagcccggtgcacgtgttggatctgttggtctttttttcctctgggaagttgtcctgctttcattggaaaaatatgcaaatctttcgtcgactcgatgtatcattatgactgcgcacaaacttttcaaaacacagacattaatagaaagtaacacatataacaataaaaacaagcatgtctatagcgacaggggtataaaatgaaaaaagctggccgcccagtgatgattcgactatagccagtcgaagttcatcttgcagtatacatcacgtatggaaaattatgtccctaacaagttattaacatctgttcttacttcgggcgctcgattaatgccatttcaatcgaagactgcgtatcggatgagggcagccgaggccgagcatttgcccgtgactcaacaatgtccatagttgacattgtctggcgcatggcctcgtgaaaatcgtagattccgctgcgcgctgaatgctgttccgggctcgccgttctcccagcagtgccagcactggagctagcttgcgcctcagtatcctgtgacgggagactgtttgcgagcatgtcgaagagattgatgtcggtcgaacgacgagcattgccattagccccttggcaaaaggcgcatgggtaagtgcgtgtcagctcgcggagctgcgtaagggcgtggaattcgagtttcagcttgatactgtaggcgactgtcttgaagctgatgacgatgtagtgcactttgtactcggcgaggaggatcaatacgttgagcaggatgccgaagagattaacgaagagtattcggtagatgattcttcggccctgcggtccttttgattcgaagacgggcttgagcgctcggagtgcctcgcggacgtagatggcacagattattgtatcttggatggcgaatccggttgcctgtaaacgatcgtagattcccgatacggggccgcatggtatattgccaacgttgagaccgaaaaggacggccatgggaatatggaggatgaagaaattggttatgatcatccataatacccatcgtacatggcggatatcggccacgacgaggtgcagtctggaatatagcacgagcgcttgtccagtcaccatgcagatccagcccaccataaaagggactgacatggcaatggcagaggcttgttgtgtatagcgaatttgagctggtatggcatgtaacaatatcccccaggccgcgacttgcatgctccagaagtatagcccgcgatactttttgaacctttcgaatatgcaaatcacaacttccaacgagttccacgctccgatcgagaacatagctatgacctggacgatcgtgaagttggtatttaaaatgaggctcacctccacagggaggttgctcattgaggtgtccatagcgtgtgaatcggtttggccatgtggataaatcagccggcgggaaagaaaaaatatatattggtcacagctcggacaaatgccccatctagctgacatacaccattataatggagacttccctcgagcgcctcatcctgggccacggggtgggacgggataaggttgactgctggtgtagaaggtggatcatgtcactggcgagtcatgcccttcgcataaatgagagagaaagcaccaatgcagtctatgatgctagcccacggggatctggggcagatgttccggttcattagacagtcaatgaaattctgaatgggctattggtagcaatgatatgaagatcccagttttccctcccccttaatcatgttggttggagagcttattggacacagcaaacgaagggacaaaagtcgagaggctatcggcgcgccaaacagggattctcgggatctcaaacaaagaaacccagccagaagtcgtgcactgatcacatttctttcgctagtggcgcaccgaaatgggagcccagacctcccatcgaggcattcaggcattggtaatgacgattgaatgaagagatatggagtactccatacggagtagagaggaagagaagaagagaagaatagggatggattgacgtcgacgttgaggcttggcgcccgttggactcggagctctcctgacaagaagtggccagagcggagtactttgtgcacaatgaagtgttgtctttgaagtaatccgtattcgtatagaaatataacaataagcatggagtatagattgaccgcttcaatattcaacgtatccaatatatacagatcggtgaaaggtgacacgtacatggaacttatccaaaagctcaagcgctgtgctacgaagaagagatagtacagagtagagaatgtgtacattaatagattggataccgctaagccatgtaccccttattggacatgtaatttgaaaaatcgtgtcatgtcaaatccctcctgaatccctttgaatttatttccgatcaacctccagttctgggtaatcagggagtttccagtccccatccctatcgcttaagaaccgtgacaacagttgcggtatgcgaaggaaacaagctagtcctagaatgagatgcagaagtgaaatttcccattgtgagttggggattgcccatcggagcaatccagtgttgaatggctgaaccaggtcgatgaaaggtcgcattttctgatggtagttttgaaaggcctgggacaaatcttcactgcgagcaagctctccagccaggatatatgccccaaccagaccactacttgtccccattccactcaagggagaaggacagtatgccgcatcccctagaaggacaacccgaccggagtgccaggtatctgtcttgatttggacgacattctggcagaaccagttctctgtagtgtccatcccttcaataaaccgatcggcctgccaccccgcgtcgcgaaacctttcggcccaaaactgtttttgctgcccaactgaacgtttcgggatattccgaagttcttccgagtcagatctaagcgtgaagtagacttgggtttccgcttgattgtggcttctggtcaggatcatccggccgcccgggcagaggtacgacttgcacatattgctgtcagtttcaatccgtggaacaaaccagtacgccatgtgtacaccgagctggtgatattcgttcggggcatcggggggtagaatgtgctttcgaatttgcgagccctgcccgtctgctccaaccagtagatcaaatgtatccgaagagccgtcggaaaaggttgcgactaccccttggtcattttgcgcgaagccatccaccgtttggccgaatatatatttcactttgtcttttgttgcgtcgtaaagtatgcgcacgagatccccgcgcatgatctcatactcggatgtcatagactgtgcacccttgccagacttattggcgaggactttccccctgacattgcccttcgcgtcaatgaaggagacgcctgcttcgtcgacgagcttttcgcgaacggcgtccatgagacccatgcgtttgacggcctcgatgccttgtccgcggaggtcgatctgggcacctgtcgctcttagcactggggaccgttcgacgataacaacttggtgaccatttcggacgagccagaaggccaaagctggacctgcgacacctccgccacaaatgaggactttcagagccattctgtagagattatctaggagagagttagaagaaacaaattctctgtgtaatcagcagtctggatttgaattttaggggtagtaagccggcctcgcacaattcggatataaagggcaattgctccttttcgctgtatataccggtttgtcatagtgggtcatgactctgcatcggaggcatctcataggcaactattttggggctgcggaggcccgtggctgaaaatcaaggaacgggagtttcaccagtacgttgagtatttgaatcatccatagaaaaaaaaccaagaagttaatgcatgatagagctaagtaacactacaaaaaatgatatgtaatcgacaaattattcacaggcgcggacggccggtcacagggaaacaagggatatcataacggtccaaattcataaccttggcccaggcagcaacaaagtccttcttaaacttatcctgggcatcggagctggcgtacagctcagaaagagcacggagctcagcgtggtgaccgaagatcaggtcaacacgggtggcagaccacttcttggcaccggtcttgcggtcgaaaccttcaaactgctcactgtcagcgccggttggcttccagacagtgctcatgtcgagcaaattgacgaaaaagtcgttgctcagctggccagggcgggaggtgaagacaccgtggtttgatccgtcccagttggcgttcagagaacgcagaccaccaaccagaacggtcagttcaggggcggagagggtcagctgctgcgccttgtcgatcaggagctgctcggtgcggacacgacgagtcgagtggccgtagttacggaaaccatcggcgaacggccgcagccagccgaatgactcgacatctgtttgctcctgggtggcatcgttgcggccaggggtgaagggaacgggaatacccgcggatctttcaagggcggcagatccagcaagcacaatcaggtcagctactgagacgcgcttttcgccgttctgggcactgttgaagcggctttggatgttctccaacagactgaggacttcctgcaactgcgctggattgttgacatcccagtccttctggggagcgagacggatgtgggcaccgttcgcacctccacgcttgtcaccaccccggaaggtagaagccgatgcccaggcagtggcaatcaacttggtgggctcaataccggtcgagagaatctcgttcttcagcgcaatgatgtcgccattgtcaatcagagcgtaagtgggagcaggaatgggatcctcccagagagaaacctccttagggatctcaggacccagccagcgagcgcgaggtcccatatcacggtgcagcagcttgaaccacgcacgggcgaatacatcggcgagctcatcagggttcgcaaggaaacgacgggcaatcttctcgtaggcgggatcgaaccgcagagaaagatcagtggtcagcatctgaggcttgtgcttctttgagtcaaaggcattgggaacgatatcgcccgcattcttggcgacccactggttagcaccagcgggactcttggtcaactcccagtcgaacttgaacagatattccaagaagttgttactccacttggtaggagtacttgtccaggtcacctccaatccactggtgatagcattagggcctacaccggagccgtgcttgttgtgccatcccaggccctgtgactcaatgccagcagcttcgggctcgtctccgacattatcagcaggggctgcaccgtgtgtttttccgaaagtatgaccaccagcaatcaacgcgacggtttcttcgtcattcatagccatacgagcgaatgtgatacgaatatctctggcagcagcgacagggtcagggtttccatcaggaccttcggggttgacataaatcaaacccatgacgaccgcggccagcgggtcctcgagatcgcgagttttgatatcgctctgtttagcctcctcctctggggtctcggcctcatagcgagcttcattagtaaaccagacgttctcacttccccagtacaccgactcatcggcttcccagacgtcaggacgacctccagcaaatccaaatgtcttgaaacccatagattccaaggcgacgttgccagttagaaggaaaagatcggcccacgagattttggtaccgtactaagtacaagagttagtattgattgagaaactagaagtatagaagtgtatagttctcaccttctgcttgatgggccaaagcaatcgacgggccttatctggaaatgaaagatacatatcagcatgatatagatgtcaactcaactattaatggaactcaccaagggaaacattatcgggccaagagttcaatggtgcgaaacgctgctggccctggccaccaccaccgcgtccatcgaaaactctgtatgttccagcgctatgccaggccattcggatgaaaagaccaccatagtgaccaaagtcagcgggccagaactcttgagagtcggtcataagggcgtgtagatccttcttgaggccccaataatcaagggtcttgaaagcagcggcataatcaaagtccttattttgaggattggtagcatcagtatgctgacggagaatattcagcttcaaggcattaggccaccagtcagtgttcctagatgagatcagtatgttgaagcggtatatcaaatgtgccgaggcagaatcacgggagaactagggaccataccgggtaccacctccagcaacattgctcttcttgtgcgcaacaggacattcacccatgatggcagttggtatgataaagaaaacgggaaatctgaagagaaagaaaagtgtcgggaacaggatgcccccgcagtttaaatggtacaggctgtggatccaatggcgggtcacgtattaagcagctcccatgtttagtgcagattccctcgatatgctagtttaaagggaaatcatacgaagatgacgtgaatttatctttcttgaatttatcattggccatgcagcgacaaaatccggggcgtgcggggaaagccataacagtccctcacgaagagatcaggaactcattggcggaatgcgccgaagagcgccggattccgattcgacccaatatataatgagctgacaaaatggccatttctagatgctggaggttgtttgtagatatgagaaatgttgaatcggagaatctttgcagtctggccctatgatctgactaatgataattagttggagccgggccctgataatcgcccaccggtctatgttgtatgtacggagtacggagcacggagcacggagcatatactccgaaaatcaatgtatgaccctttttcctttttgattcacatatagaattagtggtctagtagtacataattcgaaattctccttgaacggtccactgatccagagaaatccttgttcggatcatggtttatccgagccaaatagggcggtgtgttccagcttcggaagcgattgcctaatacagactagcgtaaatatacaactctaaccagctctgataaactgcattcatcgtcctattctttgatagctttactcactggctggttagataataatatagcctcacctatctcttgttcttccctttcatatcttctagcaatagaaacctacgtcacgtctatcattcttctctacggcaagctggcagaaacagttcaaacccacccaaacatcaactacataatccgtgatttatcaataaaagtgctctagtattgaatatcctaccaatgaatttaaaagcttaataattgtttgaactatgggccatcactgcaacaggaagctagcaggatgatgcttcacaatgagcgcaatgtctcatacatttcggcaataggaactcacccaagctagcaagattcaagaaataacgggcttggtacccatcctcccacacgagactctcaatcagcaaaacttgtgaatttcttgaagacctctacattggccttcatttcatttcttactggcaaaacgcctgtcgctattagaattgtccatatattccggcacttttccttttttgatatcccctgtgatacacttggaaaggatgtgaccgtctatcagtgtgaggcctagcggtctgatcaggcgttacttactatgggatcaacaagatctatatcgcggctaacgtttgatcagactatagcggccaatcaggcgttagtatcaggaaggtacatgactatacaatggcgtcgccgcgacgatgcgattaatctagtctcttctaggaacctatatgcattcacctcaaacggtcttcttccttttgatcctcttcttattcatcccatcatctacattcacggccttcagccactacttcgttacaatcttttatcatctgctatcatggcagctaatgccaccagccataatggccttcctagtcacttctctttccgccaaggtatttccgtcatcaagatggaactccacatgacacctgaagctgctcagcgctactcggatctgtggaatatgcttgctgctcgccagctgccttctgagcaccttggcctgatcatgaccgtggtgaccctggcaagacttcattcctcctttgccaacaatatagtcgcctgcacccttgtcaggacattcgtcgagtcgaagcaaattgccgggcttcgcgctgcccttcctcgcctgccggacgaacttgcggctgtcattcctaatctctttcaagaatccactcatgccatcacgatgttgccggccatgcctgccgaattctccgagatcttttccctctctgcaaacgatgaaactgccctccgccgggagcttatccacctggaaccgaagttgaagcctgcgatctccatctcggacgatgagttcaacatcattgtcaataatcttcccgacttgccgcctagcatgagtggtacctggaaaattccgctcgaagtgttgtccactatgatcaaggagaaccaaggtctctccgacaagcttggtattttctggaatgtcctctcataccaggattggttcgcggtttacaatgccaccagcttctttgagggccttaccaagtttgccacagccatcgcagccctggatggcaacgagtcccaggtgtattgggatttctattgccactttctccgagtgattgtggctaggcccctcgcctagatgcaggattcactgcattgtctaagcagcggtcgttttcttttgcgtcctctcttgtttcatgagaccgttgcttcccattcagaagagcactagccagctctcactacgaattcagatttctttcactcataacatctcacatcttcttattcgtaactcatcatatgcacataaatttgatatgcccatcccgcaaaatatcaggccagctaaatgttcctccagacaagctcacctcgtcccttttggtccatatcgtctcaaatatatgtttagccaccgatgcatgaaccaaggctgttgtccgagcgcaattatcaaaccatgacgagaagaacacctgtaactcaggactaacagcctcacaagcagtgatgaaagccggccatatcagagcagcattatgactacccttctgatcaatttcctcttgttgaatttggattagatagccccggatggcattgacattgccctgaagcatttcaggatcaatttcgtatattcggcggtgaaagaaaatagataatgctgtgtacatcgcatgagatgttgtagtcatcaccactggaagagctccattataaggctgagcatagcttggattcgcagccggtagcaaatgggcaatagctctttccagaccctttgctcgagtccaaaattccttgagactgagcctactttgtcctgcatcagacattatcgacaagtctcgctcattggcaaggcggatcacttgggagagtagcatgaggaatatctcatcgattccgtatagcgtgggaaacagtgttgagctccatcggccgggtatcgcaaggtggaggtcacgctgggctatcccggggtccttttccatgctcattgtggttgtggaaaagactaaattggggtagatacgaaaacctcctccatatgtagtgttgtcgttcaaagtaccacttgccccagtctgattcatgctcaatctatcagcaatgcatgttgtctcggccataatgcgcatgtaagcataacagtggtgcaatgctctcttgttgcctgatagcgctggctgactgagccccttgatgcaaatgagtttctccgtttggacgagataggcgcgtcgcatttctgggtccccttttatcatctgtattagagagaatgttagccatgtacagtgaattcacattgaggccatacaaaagcatttgaaagactcagcattgccatcaaaatctccttatatttgctcattttcgtcgctgaaatacagctttcttccatacatcgttggaaatggtattgagcctgtgccaagtatctcgctgctgatgatttccattgctgaacgtaagccattgaattatttcccaagtgaaaggcacttgtgctccatacggcatttaatagggcaagccgtgcatgattgggagacccattaagcatgaggtctgccaatgttgccattgcgcatggtattaccaggctcatccaaggtgtttcctttccatggcacaaaggagagatcaacggcacaattctttctttgtagtgggataagagattccagccctcgatattgcccacggataagtagggattgagttctgcttgtagactcggttcgtggaagtccatcccaacgctctgaagtggctcttgattcggccctgctagcattacatcgtcactgtagtctgcatctagggcatctggactgaacggggtctggttcaagtcttcctctcttggcagctcctcgagctgctcaaaccagtcacccgaggaaggctgagtatctgtaccaaaaggtaacgggtcaatcgggagtgattctgggtatctgaaagcaccaaagggtccccgaaagagcgataatggtttcgagcaactgatatccgagtcgaatatttctagatcgacgattgcctggtcgggattctgatcgggcacggaggagatgagctcaagggtcatgtctcggcgttcaacatctgccaaagattgtcagaataagccgatgatagttgcattcaaaggcggacctgtgaagatcgagtggcggtgcctggctgcattccccgcattcaaccatcgaatatcctccttgtcatgaataaaggttaactgtacgatttctcgcatcttgagggctgttgttatttcttggggaagttgtagttcccacaaaggactcggagtctccgttggggataaagcccaaattggaatgtgattccgatatcgacatggtaggtatcaactccccggtctaaccgaatgacaatttattcattctataagaagtaccaagctatttaaagcgccgtctgcattatacttatgttcaatcttctgggtcgcaaaaatcagtagttggatctgagagacctaatatcgctcggaacttcttaccctcttgggctattcccttctcacgttgagtcttgatagtcattttccaacgttatcttaagctgcaactaaagattacagacttaaatactgctgcttcggattccaagttatacatgcaagacgcactagcacgttcactcggaaagacaagcattattctacaaatcgtctatacacatgtagtggaggtttgataacaatccggcattgaatctgcagggtaacttaagtacataagtatggctagacgatgcatcccgaggtctgactctggatgactgtttaggaaaacaatttggcgattcgcagattgttgtagtgccaggccgtaatgtcctcatatttgcacggggtatcgggcgtgataaacttcttcaagggaagcaaggaagcgatacggttcggcttcgcaaaataggcaacagaatagcgctcggggatcatcatatcaaggccaattttgacagtgggcggataggttacccggtgacatgcagccctgaatgtatcattggtcaggcgctgaagagagtcgccgatgttcagaatgatctcggactttccccctgagatgacatcatggaacttccccagattttgctggtcttcgacctgtaagccaccagtggaatcttgaaacagcatggtaattgttccaaagtcggtatgttctgcaatgcgcgtggcagttccatcttctagagcagatgcagggacagctggataatgaagcagacggaattcgttttcagccttgttgtgcagtagtttgagatctgatgccgaaatatcgagggccttagccaacgcatcgaggatctctaattcgacgttgaagcagctttcatagaagtcttccatgaattttcggaacccgggcagtttctcatcagctacccagatgttgtccacaaggctgtcgtgtgaggaacccatgtcgagggtttcctgttctcgttagaatggatgttcacggcggatcatgcaggaagcacccaccttgatatcccgaacagacttcccttgagggaggcctttatcatagccactaatggaagagactgattcttggccgatataactgtatccacggttggggtttgcctcgggtgggtgtttggcggtcatcttatcctctagtgagagagagaagaattgacgggtctagtagagacagtcaatatgtgtataatcacctcgtttgtgtcaacttacatagtcaaacattttcgcaatcagattttctgggagcccatggtttttgagcttggccactccgcgcgttttgagtgtttctagtagggctgccgaaaccgcctctctttccgcgggagaccctttcaacagggacagatcaagagcttgggacataattatgaagatattcttggaattatcgtctgttatgagggtcttcttgactttcgaatcaagaatgacaatgaaatgagtaaaagaagagacctacaacactagactatatatattcgatcacggataggacctacaagtggtaggtggccaagaagaacttcattgggaaggtaatattgaagatatgaacacacagacctgtaaattatggattaccttccattctatcttcatctttcatgatgcgaagtgtttgttccgaagatagtgtaacgcacgccaagattacgccaacaacgcgtcccccaataaggaaaacaaaatagtggatcaccttcctagtatttcatttttcaagtacaacatacaacatagagataggaaagtgctgtcgccttatctcggggactgtagaagtgtagaggtatttcatattacttgcctacgacagctaaaatttcatcccttggatctcggtgtactgttgaggaccactatcactttcctcttgccgttccaacttcatgaacggctgtgtaatctcgaggctgcggagagcgagtgtccgaaagtaggagtaaaagttcatgtaggcccatttgacgaagcctccctcaaggacattcacctgctgctgaaacaagacaataactgaattgtagctcaaggcattttcaagagcaatgcgatcttcgtcaccttgattcctagaatcaaaaaactaagtcttgggctcaatgtttgcataaggtctcggataacagtggcttcagatggtgaaatattatgttggaccattttaacagccatatggttgtgacgccacctctgatacatagtttccattataccgactgccgtgaatagctcccaatatttgggaggcgattcaacggccgttagctcagtccaaagtgtcttgaaagtaagcgagttgtcggaatcgcgaactggtcggtcatggcttatcccaactaccgtttccgccctagccggtgatgggtgcaaagagatttggagcgaatcttgaatttcattaccgctgtctggctttttgcgcttgcggcaggttttgtttgtgtgaatcggcatattcccccacttaattccaatgaagttgataaaatcattggttttgaattcggcatctggggacaacttgttcttccaggctgtggaaagccattggccccgttgaattgcttcattcatgttggtggcgtcggcgccgggaccaataagacgttgaagccaaagagaagacccatcttctggtatgcagatacgctctgccctgcaagcacaagacaatatcccaaacatcactgcaacccctgagtaagatcccgtagcaccggtaagcaagtatccatagaatctccatcaaattagaatggcggagaaatatcctttttggttcatactcgatcaactggaaattgaggacatcaaaagtcttcacgtgagacgatgcgaccaccagaccagcttgaaaaaatggctgtccacctgcggggtaactgtcggccagcaaccatccagcatcattgtatccccccgtgaagacatatacacctttccacgcgacaagcgtccgctgattgttctagtagaagtcagcagtgggtaatttcgggactcgttctttgcgtacatcccctcggtcgtctaagtcataggctaggtgttggatgcgataacccgcaggcaaggtcaaaagggcatagatgacacctgcatccgacaagcggacgttcttgggattccacttgcactggttgatgtccacgcccacttctgcttcaatagatttgcgatcggggggatttgtaactttccaggtacggagggaggccaggtcttcctggcttgacagaatgcctgggttgaatccagggacatcgccctctttccattcgactgggttgctgcatttattctccaactcccgctgaacccatatttggcacctctgacgcaattgcgacaggtccttcagccagtcctcaatgtttcttgtggaagggcatgccatctcacaagcccggggcggggagatagatggcaccgatacagatgttagttgatgggtggtttgtaattggagatgttcccccaggtattgctgcttccaaaagggagaggtcaaaacaggtagaagactgctgtgaattggaaccagaaaccttcatagacaacgaaggagaaagtgagacgttgatgaggacgaatactgtcttttttagtgaggatatgagaagtatagagagtcacagagagagagaactaatcagatgtttgaagtgtgctttgttgacgaagtatacaacgcccaaaagggaatcgggcaggcctcgacggtcattggaccaaagctgcgcgatggccgctgcgggatgccgtagccccccaccaacaaacagcttcctgcgcatcacttcattcctctcctcacactttttatttcttttctgctttttttattttctgtaatacactgagcgttccattttttaaagtcttttcgagactccgtacttgtcatggattccacgggtctgggtagtgatggtgctgcctaccggtctcgtgggtaccaactcgaaatgttagaggccagccgcaaggaaaatatcattgttgcggtatgtttttctcttcggtgagggcttagaaaatgctgacgattgatagatggatacagggagtggaaagactcatatgtatgtttggaggtgacgcttcctttatcggcacatttccctgacagttgcttcagtgccattcttcggattatagatgagcttgaaaacgccagttctccagacaaagtgaacaaactcgtcaatttgtatatctattcttggctcacatatgtcacagcttatttggtttcttgccccgacagtggcattgagccttcaacaacatcaagttatcactagccacatcctctctgtgaaaactaaagttttaacgggcctagataatgttgatcgatggactgatcaaggtatctgggataaggtgctcaaggatgtccgtgtggttgtctccacatatgctgtccttgctgatgctctgggtcatggttttgtccgcatgccccggcttgctctacttatctttgatgagggtacatacgtggcacatctcaaggtattccagaattaaaccaatctaacatctaatttagctcatcattgcacgagacgtcatccggcgaacaagattatgcaaaatcactaccatcctactctactgaggtcaggcccaaatgctgtgcctcggatcttgggactcactgctagcccagtggtccgttcgacccaaaatgagcttgagtcggtccatctactacatgatgataatcatctccagcaactgaccatgttccccctagaacgatcgaatccaacttgaacgcagtatgcaagactccacgtgtccatcgtaccgagctgttggaaaacacccatcgccctcatctcgagcgtctcaattacatacactttgatgaagcacagtatggccttggaagtcgactacttccatctctcatagaatgttgcagggcctataacatagatgatgacccttggatcgaatcattacggttaaaggatcagattgtggagctggcgaaggccctaaatacaggtaaaaccttctgtagcgagcaactgaggatgttcgaagcacgcagccgtcacatttatgaggagctggggggttgggctgccgactttttcatcagtgcttcaattgatcaacttcaactttcaatccaagatgctagtgaaatgtcacatttggaccaaagagagagaatttatcttttggaactgctgcttacgatgcctacgccagttgcagccgaggagaataatcacgtatccatcaagcttgaaatgcttctcaactatctcgaaaaaatggataggcctggcttttccgggctactattcgtcaagcagagagcgactgttagtgtgttagcgcgcattttatcccttcatcccaaaaccagagatcgcttccagtgtgccgcttacgttggttgggcgagtgataaaaatcgcaagggctgtctcggtgacttacttcatcgggacatgcaacgaaatactctcgatgaattcaaagctggccgaaaaaacctcattgtcgccactgatgttctcgaagaagggattgacgtaagcgcatgcagtctggtcatttgttatgacaagcctgcaaacctcaagtcctttgtccagcgtcgtgggcgtgctcgtcatagagaatctacatatgcggtcatgatctcaaatgaggacgagctgttgagtctccaaaaatggcaggaactagagcaagccatgattaaagcgtaccaggatgatgagcgacagcgtcgtgaagcttatgccatcgaagataccgaggagcacgtgaatgagacactttgggtggaaaaaacgaggtgagagcgatccagtgcttccccttgatattggctgacatcatttggccagtgctctgttgacagcagatgatgcattgcagcatttgcatcacttttgcgctgttttaccagttgatgagtattccgacaatcgaccaatgttttccttccaagagaatagtgtaggtttgcttttaggaacggtcacgctaccaaattcggtgcatccgacggttcgccggacaacggggaaagcctggtggcgcacagagcgagcagccagaaaggagactgcatttcaagcttacaaagccttgtattcgtatgggttgctcaatgacaatctcttaccactaacaagaaaaccagagttgcggttctcggaacagatgacgctcccatctattgtacaagctgctgagcagtatgacccttatgtagaacttgcacaaggttgggcttcgggtcagctgtgtcagacacgcttgaacatatgcagcaatggttctcccgataaagatctggccgtatgtttgattttgccaagattgacccccatgccacaccccattcccctctactggaaccccgagacttccttggaactctactttgatccgcaagtgtcgactttcgaggcgacagtggagacactcgaatatatgagaaagaccacggccctctatctacaagcccccagctcgcgccagcggggcgaagaacgcgacttcgtggctctcttcattcccgatattccacatgaatacttgggacaatggcttgcggtgcacgaaggaaaggagcctgcactggaagtttactcgaggaatccaactacgccgcctacgggtatcgtccgtgaccagtccaaattcagtgagccacggatattcaacaggtgggtcgttccggccgaggtgacaaagacgtcgcctattgaagtggaatgttcatcacttccacgccgacgaaatctcctccaggtacgaaccatcaatatcactggagatggagaggtagatgcaccaaagaagtcccacgttctacctgcagctgcttgcgtcatcgacaagctccccgcgaaacaggctgtgtttggactgttcatctctgccattttggaccggctggaggcatccttggtcgcacaccgattgaatgataccattttgaaaggagttggcatccaaaacatagaccatgtgattacagctatcagcgcccccattgcgcaggctagtaccaactatcagagatatgagttctttggtgactctgttcttaaattcaccgttagttgccaactatttttccggaaccccaagtggcacgaggggtacctctcggagagccgtgacaaactcatccaaaactctcggcttgctcgtgcagctctcgatactggcattgactgctttgttctaacaagtcggtttaccccccggaaatgggctgcaccattgatcaggaacaagttggacccctcgactgctaagaggaagatgtcaagcaaggtcctggcagatgttgtggaatccctcattggcgcagcatatgtagacggtggaattcggaaagcgcaggcctgtctccatcgcttcttgccagagatcgatctcttcacgaatgagatttcgtccctcctccccccacccgggaaaggagtgagtaacttaatcaaccatcaccgattggctggtctgatcgggtacacttttagtgaccctgccatactgacagaggcactcacccacgcatcctgcgagtacgatacatcaacacaatcttaccaacgcctcgagttcctcggagatgccgtcctggacatggtggtcatggcagtgatagcagcccaccccgtggaaatggaccagggaccaatgacattgctcaaacattcggtcgtgaatgccaacctcctcgccttcttctgcatggagctaagcgcaccagacgaaccttcccacatcacacaatttgccaacggcgaagtcaaccttgtgccacactataaccagatccacctctggcgcttcctccgctcccatgggcctaacatcacatctgcccgggaagcttgtctcgagcggcaccagggtctccgtgctgagatcttagatgccctgaggaacgaaagacaatacccgtgggaattgttcgcccgcctgcgtgcggataaattcttatcggatatcgtcgagagtgttcttggggcgattttcatcgactgcgggggcaatttggatgtgtgttacgcgttcgttgaacgtatcggtctggtgtggtacatccagcgtgttatcgctgacggggttgatgttgttcatccgcggaacaccgcgcagaacatggtgaagggagcaggaaccttggtcttcaagaggaagagggtcgaatctggaggcgtgggtacgtatcggtgcacagcagtggtcaacgacaccgagatcgcgctggtggagggttgcgcttctgccgaagaggctgaggtcaaggttgccaacattgctattgagtacttgacattgcacccattggcttctacatgatgtcgaaacgacgacttgggaaattgacgtgctcttgaatgaattttggatattttcgattttgcttggatagataccatttgagaagtcttgaattttgacagccttcggtgaaatcgtaagctatgtagctaattgacatgcccaaataaataaagtagtaaaatatggtcgactcctatgccttgtctcccttcgcaccgcgcttagaccgccgcacaggggcgggcttaggttcctcttctgtctggtcctccgcgtcagatccaatggagtccacttgttcctcctcacttgaagtcaccatcacaccctcttccgtactctcggaggaatgggtatccacgtcagccttcgacacaggctcccatgtcccctcagctgacccagtatcctgacgcaaactgctaaggatctttgttgtctcactttccacgccattccaagctccacagctgcaacaccgccagcggcccagctcttccggtgttttgatcccagggggagcctggccgttgacgagccgacacgcgctgcagatcatcgccatccggttgcggggttgggtttcatcctctcccagcagcacatccaagacacggtcataccaatttggttgttcagtgtattcgctgttctgagggaatgcgttcggtgcaaagctgggttgattggtgggtggttggggagagaaagaaggtggggaagacgactgctgcggtgtttgcggggcccgaggtagctcgagagggggagagggataattgggggatggcgggctgttctgcgatgccgagggaggacggcgaatgttggcagtgggtggcggcgggagaccagtgcgaggcacattctgtagctgctgtgcgaactgccccttctcggtttgtctctttgggctcggggaggacctgggagactcaccaccgtacttctctagcagttgctgggtggagttgtacttggttgcgaccttgagcttttcgatggtctcctcgcgctggttttggaagtcatcaagacgacgttgcatgcgggagattcggtagtcgaagattctggagctgagagtgcgcacaccatatatcctgaagagacaagaatgtcagcgatatgggaacgtgcagaataaggaaagacgaacaggaccggcccgcctatgatggctgcatattccttgattccccagctctcccatcccagtacgagggcgagaattatagagtaaaacagataggcaaatgtcgagtagagcgtccacagagccttgattcgccgggaagactgacgttgctggtcgagtcgcgtggtggcttgggcgatcttggtcgacagcgtcgacagtgtcttctcaaaagaagctgcagaattcgtatcgccctgagtaatatcagcgacagtaaagcaagataatcaagtaccatatatctcaccttccagggccaaaaagaaaccattattctacatacatagtatgcctgtgaactgggaaggagaagctcgacagttccaaatttaggaaggcgatacgcacgggccacctcaggtcggctccaactttggggagtctactaggaagtccacctaaatagggggtcattggattttgtttatttgttacattgtgcatgagtatttcggatatcattacatagattccagctattcatttttgttgagttgccctttctatgactttccgagctcagcagaccgagcagtggcagcttggacagacttgtcgacgatctctttaaagtcgagagactcaaatgtctggagagcagcatatgtggtgccgttggggctagtaacgttcttacgcagctgagaagggctgtcagcgctctcaaccagcatcttgccagcaccaagacatgtctgtgtagccaaccgagtggcttgttcctcagggaggcccagagcagttgcacttgcgatcaagtgctcgaccatggcaaagaagtaggcgggtccagatcctgattgggtcagatcgatacttgttgatggccttttacgtaggagacttaccggacaatccagtgacaacatcgaggagttcttcgcggtccacccactcggtagccttgctaacacttccgagcatagcattgacaagatccttctcatctggggtaatgtcggcgccggcaaaagcacccgaagcaccctcaccaactagggcaggggtgttgggcatcacgcgaacagtgtgggcggtacggctatcgctcgttgtcaaccaccccttcaagctatcaagggtaatacccgcagcaatgctgacgacaacgggcaaagtcgcacgcggcgaccaggcaccaccgagctcctcgcacacactcttggcaacttgtggcttgaccgcaatgatgaccaaatcggcatcgcctccagcctcaacgttagaagtggtggtgcgcactccgagtgcggccatcttctcgcggttgacatcccacggctccgagacgcagatattctgcttgttgacccccttgctcagcaggccaccaatgatggcggaggccatgttgccaccgccaatgaaggccagtttgctctcttgaatggaaggcattgtatagatacagctgaaagggtgcccaggtgtcgtactgtccaagtgcgtagtcggggagtcccgcacttatgtaaaaatttggtggggcacctggacccgcgttatcgcaccggcccggtgttccaagcggttggagaagctgtctatcttttggtttctgtttttattactcattaggtttcttgaatactctttatcaccctcaatgaaaagagaaataatgcaaaatttacttgtagattggaaattaataacggggttggcttagagacactaaatggaattgaatgctttaactagctgttatggctcggttacaaatcatagtatctcaaaaaaagagaagacaaagcaaaatccaaaagctgaaaccgtcattcgtaactcgtgatagtatgtatacagggtatcaatcagtagacacgtcgtgcgtggcttccacgtccatcagtgccatgcatgcggcgggttccagcagcctagttttaagatgttagcccgagtccaagtcgaatacgagtcgtttggtccttaccttgactgcggggcgatgcgtcaagcttcctttcagcttcaacatagcgccggagaccttgtcgccaagtgagggtttgcgctgatggcgagtatgggtagattttccataggcgtttcgatgaccaaaacgactcccagtaggaccagtacgaccagtaggaccagtccggccagtatggccagtgtgatgatggccttgcatggggttctgcttcgttgtcgttatggttttgacggagcgcgagttcgcgtttcgccccttaagtctggtcatcagcgtaggctttgtggtgcgggtggttgtggtagccgggcgacgtcgatgaaacatggtgatggactgatggatgttgtatgtagtttaaatgtttgatatggaatgtataatgtatacaagtgtggtaggttggttgtatttgcagttaggtggaaatcgacgtctttaaatcagctgcagagatggccttgggatgacttgatgtcaagcaaaacgtacgccaagcgccatgtcgccttcaaagatagcatacaggagacgttgacaaagaggcgctcagccggcgcgtcatccgaaggacgatcttctctgggagtctgcagttaacttgcacaggacaggagacaaaaatgccaccaaaaataagaatacatgctattggtataagatagatcgtccttgcagatcaaaaagctagacagggatatattttctgactatgtcttaatgacgaagacaggatgagcgaccttggaagatgacgagttgaagttgtacaaacgtacttgtgttgtgagacggaggatgatgtcatatgatattgctctgtgcgcctgccaagacatcgttgtacgcactgaaagcttggggaagatcaaatgatgtattcatgctaagctacctacggataggaggtcgcctcaagtcaccttaccgaccgacccaaattgcttcgtctgcatcgctctaagttgtcccaccatagttatcgactgttcggatgtctttgacgattgctcgcttcacgtccttattcatgctaaacccaactgcgttgcagcttgggttcgtcaacgacatcagacaggtcgacagctacgacggtacaatccaaggtgacgcagctcgttggtggggatagattttatcccttgggaggccatcgctggtgggatcgtctgcaacggttcctcgacaggctacaggagtagacaaagcccgagtcagggcatatcaacatcttgttttcgatcgttcacggccgggctgtggtagagatgtaacgccaggccttgtaagcttggcctgtgtcagagtgatgtgtttccggtctgattcgatgatcgccttaaaagtcacttgcaccgctgtcaggaggagctaaagcctaagaacgatcgcggatctgcgcaatagccttataactctgcttatatattccagcttatcccatctgccacataaaccgcacctgttcaaaacagaacaattagccatagatcatgcaatggtattgcaaattaaaaataacaatttcagtaactcagagaccaatatgaaacaatgtagatagacacggattcaacacattctttgcagaaagggaagaggtcaatcatcatagagactgtatatgttgtggtttgcgaggggaggacctgaatagttacctggaccagtcggagtattccccccagtggggacgattggtggcggcgggaactaccctgtgtttgtattagccactcgtgcctggagatattgttcctgaagcggcggcgagtgaggttctgcgtaaaagcgaatgggtttttcttttcaagtgacaacgatcgctatttgtcattcacagacgtggtggggagaggaatgaatggcttcctccatattcgtcttgaaatgagtgataatgggccagaaatgatgcaaaaaaggtgtggtgaattcctattgcctcaaggtggtttggaggttagatccgaattcccctgagtggtattaaatatctgtctctgggcagggctagggcatcggccctatttcagaaatttacgagtaaggggagattatggagaatgtcgtcattgaaccgtgcgacgacggtgtacccacctataaatatgtaagggcccatatgataactaggtgagatgtatgtatacacaaatgttgagtcaatctggcaaaaaaagaccatgattgaaggcgtgatcctgtctgtagtcctcgattatgcctttctccagcggctaccttattttgcctaggatgtctattcaatatcaactaaaacatgatatgcgccgagatccgtctggttgacgagatactctgtgcagagacgcccaaatatcattgattgtagtggttctggccaataatcttgactaggagctcttatattgaaagcggctaaaataggaaagccccacccagcagggaaaatatggcggagtgacctaagtacgagccggattcatatttcgacatgggcattttcattaactaattagtttcagctgtgggagttcttacaaatatcgatattgacagggtgagatcatctgaaactcaaagcaggcatacatacatgcacttctatagacgtcaggggtggccaggtgtgaagtgcttattcacaagcacaggtatcgtgctcgactccgtgggcagcatgatgcagaaattatacgccgccatctctccgagggttctccacttcctagtacggagtcgagggaaatcccaggcccagaacccccgcactctgccaagacgcaacgtttgagataagatcaccatatgactgtcaaaaaaggaaatgcactacaaagatcgtccaaaataaagccgtccggagatagcaatggggcagatatgtaaatgcagtgaaatctgaatacggaagtataaggttgaccttgagaggcaatttcggaggtacagtactttgggcaaccaattgcgacttcagaaggacaacggacacactattttatcctccaacgcgcatcaacttactactttaggtctgtatgccgccgattgcaattctcaattggcttgtatagtatcatcaacacctgtcacatgatttatgatattaccatgacaccatgcaaaagtacctttctatatttagtggatacggaggataaaaaggtgcgtccgtggtcttttcaagtcgtaatcagtgatctgtttttcactctggtcacagtcccctagtattgaaggttgaagctgcttaaaatgaccacggacgccaaaatattggatttttctgtgagtctctctacaagcgtcatgacattgatcttccgacttatcattgctggaatagacattccataatgtgatcaataatcagttgaccacaacaacggaaacccggcatggcatcaaccctgccaacactcagcctaatccacccgtaccagtttcgacccaggatgaccttgacaaatccgtaaaggcagctcaagatgctttcaagggctgggccaagacctcttttgaagagcgacgtaaagccctgcatgcctgggccgatgccattgatgataatgccgccggattcgcacaaaccctcacaatggaacaaggaaaatcattgactcaatcattttcggaggtgaagatggcaggtgaatggattcgtggtctcatcgttattgagattagcgacaatgtcatcgaggaaacagaagacaggaagattgttcaacgccatacacccattggcgtggtgggtgccattgtcccctggaacttccctgtccttctggctgtcggcaaaataacttctgcggtatacaccggaaacaccgttattttgaagccgtctcctttcacaccttactgcgacttgaagctggccgagcttgccgccaacttcttccctcctggcgtgatccaatgcctgagcggcgatgagtccctcggcccgttgttcactgctcacccacgaattgagaaaataagcttcactggatcaactctcactggaaagcgggttatggctgcatgtgccacgactctcaagcgagttaccctggaactgggtggcaatgacccggcaattatctgcgacgatgttgatattgatgttattatccccaagattggacttctttcttatctgtgcagctcgcaggtctgcatgatgatcaagcgactttatgtccacgagaagatctacgacgagttcttggagaaattagtcacgtttgtcaagactctgaaagtcggcgagggcaccgatgcggataccttctttggacctgttcagaatcagatgcaatatgacaaagccagaaacctgttcagcagtatcgatactgaaaaactgaaagttgcgcttggaggttcgatcgagaagtcttccgggtactttatccatccaaccatcatcgacaatccgccggagacatcgcgcgtggtacaggaagagccatttgctcccatcctgcccatcctgaaatggtctgacgagaaagatgtccttgagcgtgcgaatgccttggataccggattgggctcttctgtctggagtaaggatttcgaacgcgcaactcgcatggcagatcaactccagtctggttgcgtgtgggtaaacagccactttgacgtggcgcccaatacaccccttggtggccacaagcagagtggcatgggcgtggaatggggtcttgatggtctgcttgagtattgcaattcgcagactcagtggttgaagaagagtttctagtttgtagtttgtgtctagttttgaataagacagttaaatgccaacaccaaaaaattcgaaagactttgcttcagagattgcaccgtactagttcgttcgcccactttcctgaatatcggagatctccccagagaaatgtgtcaattctgagattcatttgttatcttatcacgcccctcgcggatcttttcgtccatcggcagactccgtcttgtgtttcgtctcacgtgagggtatggaatttgacgataaaaatggctgaggggtcttctgggctaaatcccattgaattttgcaattcgactaggaacgcccatcagacgattcgccatgctgtacacccatgcaacgattgtgaccgtggatgcttcgcgccgaataatcaccgatggagcaatccgcgtagtcggcgatgtcatcgtggatattggcaagacagatatcctaaaagaaaagtatacagccgatgaagagtgcgatctctccggtcggattatcattccgggattgatttccacccatatgcacacggcacagacactcctgagaggtgcagccgacgacctcgagctggtgtcgtggttatgcgagaggatttgggttctccagggtaacttcacggcagaggacgggtacgctgcagcacgattgagtatcggagagatgcttaaatcgggaaccacctgcttcttggagagcatggtattgtaacccgtcaatgccatttaataccctgagattgacatgaatacagtttgccgatcgatatggctttgacgggctatgtcgcgccgtcgaggagagtggcatccgtggctgtctaggtaagattgtcatggacattgcaaaatatgccaaagatgacgcctgggctatgcatcctggccttgttgagaaccgtgaaacatcattgcttggaactttgaagatgtgggagaagtggaatggtgcggctgatgatagaatcagagtttggtttggagccaggactcccggagggtatgagacgagactgttattgagtatcactttctaatgataaaccagagtatcagacgcactttataaggaaatgaccgctatttccaaggacaagggtatacccattaccatgcattgcgctgaggtcaaggccgatcgggatttcttcgattcggtctcgcacaccccgatgtcatattgcaaatcagttggtttgctgagtgactccacggtcctggtgcatatggttcatttggatgactcggacattgagtaagatatggaacatatgaattgatataacggatgctgacgatatcatgaagactcctttcttcttcgggaacgcatgtcgcacactgcccaacatctaatgcaaaggtaagttgtattgccatctggtttatatacggttggaacttaacgatctaacaatgtctagcttgcgtccggaatctgcagggtgccagatctgcaagatgctggagtcaatattggtctgggtaccgatggtgccccgtgtaacaatacatgtgatcttttgcaggagatgaaattggccgctattattcataaagggatctcgcaggatcccacggaagttccagccgaaaacgtgttggagatggctacaattaacggcgccaaagcactgggcttggataaccagatcggcagtctggaaattggtaagaaggctgactttgtggccatcgatgttcgaggaatccacagccagccttggttcaacccggtcagcgcagttgtttatactgcaactgggcgagacgtcgatgttgttgtggtcaatgggaaggttgtggtcaagaatggagtgcttatgactatgaatgaggaggaaattgtcagagaagcacaaagaagaagcaaagaggtagtggatagagctggattgggcaagaaagttcagggccgctggccagtggagtgatcaaacgaagattcaactttcaggatttttgttttcattctattatctagcaagtcagttcatgcgaggaccatgcctctgtataggtctatgatctaggtcatagcacattccattgctattcaagtcattaggacatgccttgcttacaacagaccacgcaacgcttcgcccaaagccataatagccatagcctggccataaggcattgaggtcaatggaatcgtcttataaaagtaaagacattcacccatcccggtgccaaagctggtattctgcaattctcctttctcatccacgtatcccatcactgcgctgatagccttctcagccacggggcggtattgggcaccgatgtaacgtttccgaacggccttgaggataccgtaggcaaagccagcggtcgcagaggcttccaagtacgagtcgggatggtcaaggagggtgtgccacgcgccggatgacgactgaagacgctgaagggcctcacactgtgcctcgagtgtatctatcaggtgaagacgaatagggtcatttggttggaggtcgagtagctcgatgatctcgggaatgacaattgtgacccagctgttgccacgggcccagcgcgcatctgcaaaattgtgtccgccgtgctcaaaagaccagccgtgaaaccagagaccagtctttgtatcgaaaagatatttgatgtgagtgaggaattgctttttcgcctcttcgatatattggggtcggttcagaagctttccgatcttcgcgagtggcataacagtcatcatcaaagtatcatcccagagctgctggtagttctctgtgatataagtcatatgctgcatgccaccgtagcgggtgcgggggagatcgtgcatcgcccactcagcccacgcatcgagccacggcaggtaggtgacattgccggtcttctcatagacgtaggcgagagtcaaaaacacagccattgtgttgatattcttggtagtgccaccctcggcaaaacgtgcagcaaaccagtcttcgatgatgcgcaacaatctctcgtcgcccgtcaactcgtagtatttccacacgccgtacagtccaattccgtgtgtccactcccaaccctgccatgactttgtgtcaataatgcgcccatcaggaagtggcagtaggaattttcctgtctcgtctttgatattgaccaagttatcaatcaacaggttgacggcgttgtgaatttgggcgcccgtaggcttaggggacgacattgtgtgatgctgggagactgttctctgtattttcgacgaataagagtctccacactttttgtccgggaaacaaaatattatgtgccggaagctccaatcctcgcaaagattggcaagagttcttccactaataagctcttgggtcaaacgccacgaagcatccccgtgggggccaagcgtgattcgggcgaaagaaggccgagttgcaaactgacggaaaaacggtggtaaggcgaatgtatatgtggcagaaaaatctcaataaattctctaactctctaaaactgacaatagtcctaaaacatgacaatctgatggacaacttagtaatcaaaacaaacaaaacaannnnnnnnnnnnnnnnnnnnnnnnnnnnnnnnnnnnnnnnnnnnnnnnnnnnnnnnnnnnnnnnnnnnnnnnnnnnnnnnnnnnnnnnnnnnnnnnnnnnnnnnnnnnnnnnnnnnnnnnnnnnnnnnnnnnnnnnnnnnnnnnnnnnnnnnnnnntgtggcagaaaaatctcaataaattctctaactctctaaaactgacaatagtcctaaaaacatgacaatctgatggacatcttagtaatcaaacaaacaaaaccatctgagttggtttttttctgcagaaaaaccagcctggtcagtcacgtgacccaactgtatcagggatggaaaatgacagtattcatcctagattctgacacaaaccatgaaaataccttcaaagtgtatttatccagatccaccgcaatgagccacgtatgttcggctatcgggctaatagatccccggattccccagcgcggggagaagactagcgtgaagcctcctcgttcgccaagaaagccggggaagcaaaggagaaggggctgactgcttgacttggttgaacggaatctgacttccggttaatatcatagacctagctaccgaaagggccacatgactctttcagcctaatcatctcacatgtagttagagcgacttctagttgggatcatgcacggccctggcaacaaaagcgcggcacattataagtccgacctatctcccctggtgaaccgtctttttgcacatactgcgtttattttgtcatggccgacggcagagatgacccccagcaggggattgagagcgtacctgttgagggaaccgaggcagtgaataaacagcacccaaaaattgatatgggagagtacgagaacaaacaagacatctcgcacgttgaacaggttctctcggcatccgatgatcttgcaaaagataacatggatatcacccgtgtggacaaggaaatccaagcatatgccgcccacagtcaggtggaaatcgacgatgccacaaatacacgcctcaaacgcatgattgatcgccgcattcttgttgttatgatttgcacatatttcctacaggctttggacaagggaactatgtccttctcggctattatggggattaaggatgacgcacatctgaaggatgggcagaaggtatggaatacttgtgaagcttttctctccatcagcatgctaaattcactcctaccggtagtactcctggttgaccacgtgtatttacatcgctgtacttatcgtcgaatatcccaccaactggatcatccaaagagtcccactcggcaagtacctgggcatcaacatctgcctgtggggtatggttctggcactccattcagtctgcaagaacttcactggattggtcattgttcgcaccctcctgggtatctttgaggcttgctgtcagcccattttcgtcactctttcctcgatgtggtataagcgggaagaacaagcggccacggtaacatactggtatgtgaatactcgtctaccggacagtgcacattgagctaatggtaaaataggtacatgatgaacggtgcccagcagattgtcggcggactattggcatactgtttcacccttattggggcagacaaggtgctcaagtcttggcaagcactcttcctggcatatggatgtatctccgttatctggggactcttcgtcatttggtggatgcctgactcccctatgcgtgcgaagtgcttcaccgaggaagacaaacgtctcatggtagaacgtcttcgttccaatcagacaggtatccagaacagaaagtttcatgcataccagatgtgggaggctttctgcgatccccagatgtggtgctactgtgctgttcaaatattcaccaccctccctaccagcggtctaggtgcattcttcagtatcgttgttttgagcttcaactttaccgtattgcaaactcagctacttgctatggtgctaggtgcttatattattgttgttctgttgtcgtctgcatggctggtcaacagattcaaacagaatacgatcgtgatgttgtgcttcatcattccgtacgttttttccctttgttttgctgcgaggccagactgacggttcacaggtcttttatcggaactatcgtccttatgacggtcgaaaacactactttgcccactaaggtgggccttctgattagttactacattactctgtcattctggtcggcccaaactctcacgttatctatggtgtcgcgaaatattgctggtcaaacgaagaagtccaccgtggtagctgcaacatttgtgtcatgggccgctggaaacgcaattggtaagtatctcagcttccctgtggagcagtttagttcctagctaacagattaaaggccctcaagtgttccttgacagggatgcaccacggtaccacattgcatggagtgtccatctggcttgctacgcctgtatggtttccgctgtcatctacctacgcttccatctcaagcgcgagaacgccaagaaggataagctgttggctgaggcaggtctcagtgccgcagatccaaccctcattcatgcattcgaggataagacggaccgggagaatttgaacttccgctacgtttactagatacgcaatatatttgcgttcgtgtgcaaatttcttctaggcttacttgctcggcttagttttgttcaattatatcttcaaaaattgcattctagacacatttcccagcatcacacaaatagaatttcgaatgtctcgatttatagtatttccggcgtatttagcggagaattgtagggcggtggaaaaggcggtatgtagaagaagccaatcatttcatggtcccgatttggccgttgccccgtactacgagttccaaggtccaattaaagctatcaagccacctagtactccgtatgcacctccatctacaatccaaacccagagccccgcagtctataaacaatcatatcgcatgattagacagtctatttgaccttgaacacatttcgaacttccccacgtggaaaccccttagcttgaggttgtcgattggaacctcccggcggaaatgtgaagccgatggtaaatatgtcaacgcggcaactcgcaagactttcacggagttattacctcactctcggtacggagtagttttctccgtcttggcgctagatcaatgggttcagatattactatgttgctcgtggaggtatcggtatctcgcatccatcatttttcccttgtctttcacccagtcgccaattttcgacaatgagattgatcaagaatgaacatcacaaattcataatggagtaacagggcttgaataataataccctatattctttcgacggcgcatctcctaaactagtgccaagggcgactaccgacactccaaaccggccagtgtgtcaggttctcttccaaaacaaccacagcttcatgcgtctgacctgacccctggttgcattgcatgattacttcttcttgatggatatagatcctgagctatctcgacacggagtcagcgcgaccccgctggtggcgttgtgactccttgcgaaaataccccttggcttgtccttctccgtgcagaatgatcactttggtcctaaatttgcgtatagtgtatccgattggtctttattcctggtactaatgaaattctcaatccgagacagattagaggtattgaccaggagcacagcacatgaaaccaagttgtactcctttagatcactataaatatgaccgtcttctgctacctaattcccactcaacgcatctatttctttgagaatccggctttttcaatctgcttattccaataaatccgcaatgtatagccttctcggctccgctctgtttgtgtctctcgttgcgggccatgggcacgtcaccaacatcgttattaacggtgtctccttcgatggatgggacataaacagttatccttatacagactcgcctccagttgtggtggcttggggtaccccaaacactgccaatggtttcattgctccgggtatgttattctattattgtcctctttgaccaagaccaatttcctttctaactctgcaaatatagatgcctacacgacctctgatattatctgccatctcaacgctacgaatgctaaaggtcacgcggtagtagctgccggtgaccgagtctttattcagtggactgccgactggccggaatcgcatcatggaccgatcgttgattatcttgctagttgcggcacgagtggctgtgaaactgtggataaaaccacgctcgagttcttcaagatcgacgccgtcggactgattgatgacacaaccgttcccggtacttgggctgatgatcagctcatagcccagaactcgggatggatggtcgagattcctcccaacatcgcacctgggagttatgttttgagacacgaattgtacgtaaatcccactcatttctcgaaaaagttgcgctaactaaccttgctgtgaaggatcgcactccatagcgcaggcactgagggtggtgcccaaaattatccccaatgcttcaacctacaaatcactggctcggggtcagatcagccagcaggtatcttagctactgatctgtacaatccaacggatcctggaattctcgtgaacatttacacgtctctgtcaacctatgtgagtgattaattggcatgatggtttgctgagatttcgcactcgcactcccctgctaatatcattttattcagactatcccaggaccaactctttacagtggtgccgtctcaatcacacaaaccacctctgcaatcaccgcctcaggtacacctgtgacagggacgggtgttacgaccggcggaaccactacaacctcaacctcaacctccaaggccaccaccacaacgctagtgactaccacgacgagcactacgagtgctaccacgacgagcactacgagtgctaccacgacgagcactacgagtgctaccacgacgagcactacgagtgctaccacgacgaacactacgagcgctatcacgacgagcactaccagtgctaccactagtacttcttctgctggcggggacggagcgtcccagactctctatggtcagtgtggaggaaccggttggacaggagcaaccgcatgtgcatcgtctgcagcctgttcttcgatgaacccgtggtattatcagtgtcttccgactgctgcttgaattgatatggcacaatgctcaaataaaacctgtcgcggaatggtgtattcaaagtatgagcagaaaatgattgcaactgataaagcctatatagttgacgcactatcggctagggggaagtactctagtagttagaggaagatttatctaattactttggacacttgtaaccttgtcatagtattctattcgcattcactacctaatggtttatgccaagtaggcgacagtaagcagttcataacaactctatcttgaacacgagctagctcaaaacgttgcctttgctaggttggaggcaaagtttccgtcgtcgaagggaacgttcgctgctccaaaatcagttgtatccagggcatcttgcacgacagcttaagaatatgttagattgcgcttccagaagttgggggtatatttggataacttacttgacaatgattcccaggcaaccaacggctgtgtgccgcccacagtggttgtcaggccgagagaatgattaacaggccagatggactggtacttgatcagagaggcggtcccatcaagcgtgtagccatctgtactgcagttccagtcaccgtgtgctgatggacagacggccacaatgttcgatgcagtggtacttccatcactggaaagccagataataacaccttcccaatcatggcgatggccgagatcagtcgaaggcgaatccttggggaaataccaggaatacatcagggcatagtagttgcctgaagaagcgcctctcactgtaaattgcaaatagaagcccgttagtcaatgtacccagggccaggtattcaatagatacttctggagaaactcaccgtatatctgccctgtgctcgtactgcaatcaccatttgagcttcctgttgggctgagaccggcgctacatcacagatattagatatgggagtccaggagatcgttaaagaggagattaattatttcgctcacttggtgttcccttctgcatcaacggccgggaaaggcacgcagccattgacaacataaagctttggctggtaggccaaatagaggtcgccaacggtaccagctggaactgtctgggggaatccgacaattgcgtcggatgcaactgttcctcgacgtgtcagctcaaccgggctagccgtcacaggcagaacagtgagagcagccagtccagctatcagttgaggaatcattttgaaattgaaagcaggcatgctaagctcgtgctatgagtaaactggtttccttctaaatatttatattgtacatgtgatattcatccctttcgatcggcatccgggccactttcttcaggcagtttagtccggtggaaacggtcttcagtcccaatgcagcttagtgagtgataatagagtctgtcctaaattatattgttgttcgcccgtgggatcgacaggcccggtgattcgtttcgttacgtctctccaacccaaaaaatccacaccccacaagctgacgcaatttatctgcttgccaaacgggtatctatgcttaattgaagctagtttagattttagtatatagtagcggtctttatgcaccttggcagagatctaatattctcttgaacaatacaccatggctgaatataacacgtggtgatgatcgacatgatcggcacgttcttggcaccactgtttttttacaccaatcacggtagacaagtcaggaaattccccagcttcttcaaaacaatcccctgcatctcagcgtcggcatcgttcttcgaagctgctatccccactgagacacttgcatagcacccagacgctagggatacttcaacttcgcttggcaatctcgatttgccacatgtggtcacatcattcggagtaagaaatgggactgcgatatggatgcgggacagaacgaaagagaaatcggccgggcttgtgcattcgtcggaaacctttccgaaattgacgttcagccagacatcatccggcaggtatggtttaccagcagcaaccacctggttagttaagttggttgccaaatcggcgtagacatcactgtagtgaggccgcgagctttcccacgaagtctgagagccactagcaccggagaaagctatagctgggattccctcatgcgcagcgtaggtggcagcgcccactgttccggagaagtaaactgtgaggccaatgttattgccgacatttggacctgtgacagccaagtcaggggggccgttgaagaatttaggggcacgcgtattgatgccatattggattgatgtcaccgggtagctattgacataacccagtcggggctattcaagtatacgatcagtctaccgttctggtaacagcggtgacgatactgacctctgaggaattgaatcccacggccgggctgccagatgggcagctattgaactcgcatggctcagtcaagacagttggctctgcttccattgaccctgtagtggcgcgtcaataaaagggcggaatgtacggagtagagaggtaggcataacatacccttgccactctgattctcagcgggtgcagataccacaactgaatggtctgctgctcctagggactcgaatagagcgcggatgttcacttccgcccagccgtcatcattggatgagatgatgttgaccgcgctagcagccagagggagtatcgcaagaatatcgaaccgcatattcaagacatccaggggcgttgatacagtgtagaatccagggggttgtttggctgctacttgtcctcctcaacacgtgggttgtcgatcttactggaaacctcggaggaacctcgggatccgccaactgccgtagtcaacggctcaatccgcaaacagacgaacagaaattgaaatggtagatcatgtactctgtgacgtttgaattcagcatcgaacatttaaataagtttaattatggtggtgggacgatgtagacgaaaatcacatccatgaatctcgaaatatatactgcgcaacctcagctccgtaggccaactgaccatcgactatcttacaacacagcaagtggaaagcaaattggttacacaagaaacttatcgtgtaaatgtacctctagaagttgaaatttatctatggatgatgccgacactaacttaaaaacgccctatggtcggcttggtcgccatctctcattcagaacgagcactcttagtcttcttgctcctcagcttcatcatcaaaaataccaaggcgtaagatgagatgcaaaatagggcagtgagacccgtctagaagaacgattagcatcgcaatataggctagataaagcagggtatactcacatctctccacgaatagtatttctcttgaagattgaacgacttcgcataatcggaaccttccgaatacggacagaaggaacacatcccagtcgaggtctcatcgtctaggtagccagtctgtgaggcgaggaagttggccatgtattggccgcaggtctgaccagacggtgcggtgaactgcacaaattccgatgcttcgcacttgaccttgacatcccagatcacttcgccaaatagcccaccaaccaagtagtggaaagggtccaggtagtaaatccagtaacgccaaaatggctgcataagggagtaaggaaccaccacgccacagaaactcaccaggccggcaccaatcaggacggggttcatcactgccgcgaaatactcgttcggtgcataggccgcaattgcctgaccaatggatgtgtataggagctcatagactgtcttgatgttagatacttggacaaatgctcgttgaatacttggtgtatcttacaaatcatctgaagatagacatgtccggaaacactggcctccaccggaagccccgctgtgaagtaccagcatgcaaaatatagtgtggcgcaaatgataaggtatggaatctccgtcagggtctgtgctccaatgaaggcgctccaatgataggttttcgactatatggacaccggggttagcgatacttgcacggcagtaggattccactagcgcactcacctttttctctcgggtctcaaaaatgtcacgactatgcaagaagaacggctgcatttggttgatacagcctggggcgacgaagatgaagttgaaaatggcaaacagtctcaactgcagggagaaagtgccgtttccaatcttccagaaggtgaatccactgaaaagtgctgcgaaaatatggagaaagaccttgttccacatgtaatcctatatgaaggtcagcatgtgtgacctggtttgtatgacattgcagcaacgtactggtgaacgccagatatgtatgctgaggcgcttagaaaccgtcttgaattggaaccagtgtgaggtcgcaaaatctgcagtatcttcaacatattcggaatcatctctgctgctttcgttgagagcatcaagttttgagagtgcttgtttgcgctcttctgactggttccagatttcgatccaatcttgtttttctgcagtaccaccaccttgaacgacatcaataatgtgctctgctggattggcatcgggggggcatggcgctccgttccgggcgaagtagtccaaaatcttggttgactccttgccagctataaccacaaacgagtcattagttgcttgatcatgaccaatcaccccaaaagttaaaactcactttctccgaaatatgtcatctttccgcccttagctagtaggagaagaccgtcaaatgcgtcgaataatactgcagatggttgatgaattgtacactaacacattagtaagatgaaaatatgtttcaagttattcagaacttaccaacacggcttggccgccatcgaccagttttcgaaggaaacgcacaatgttgaacgcactttgcccatcaagaccggaagtgggttcatccaaaaacagcagtgtgggcttagcaacaagctcaacgcccagggtcacgcgtttgcgctgttcgatgctaagtccagctccgggtactgtgaataatcagtatagctgtgcagtgaaatcaagacaccaggcgaacatacctccgattagggcttcgctgatatcacgcagctccagaaggtcgataatatgttcgacgtaagcgatcttttcttcgtgtggaaccgtcgatggctgacgaagaacggccgaaaagtccaatgcctccttgacggttgctgtttcgagatgtacatccatctgttcacagtaaccagtagttcgctggaagctgattccgactgggcggccgtcaatcaagactgatccgtagatttctccgctatccttgcgctgagcaaggacatccaacaaagttgtttttccggctccagaagctcccataagggcaaccaggtttccaggttggacaaatccaaacaccttgctcagaagctgtttcttctcaccatggaaaggtacatgatagtcaagatctttccatgtgaaggttgactgcttgaccgagcctaaaagtgcgccagcatctgcctcctttggcttctcaccttcttcctttccacgagtcttctcactgccacgcttgtaaagtagaacagatgatccactttggctgttccggagttcaagcccgcaagaagtcagaaagatgaaaaaaaaccaaaaaccaatcaaaataccaaagcttctccagatgtgatgcactgaataactgtattgctcttgaatgtattttgccccatcaataataccttcatcgtcacttccaaggactgaacatccacggtggacagacactgagctggagtatccggtgccgtatggaagatagtcgggctctatgcaagtgaatttgcgtccaacaaattcattggccatgagcgcttcgaatgcatacgctcccggattgaggtagaagatccaacggaaccacacatgcattttatggaaaggaataaggtatcctgcaacttgtcagtttggaatgcttcgtatcaatgctgttcaaatactgacctccatagacaaagaagacggtggacagtaagccggatactttagatgcatttccaaactgtttgcacacagcgccaacggctcggaataattgtacaaaacacaatgtctgtgcaatgacaatgatccaaaatgtgaagaactttcctgcgttcatttgaagagcagccatgaagtaaaggatgagcgagaagcaggtcacctggaacaccacgactgggatatcagtgatggcgttggcaatagcgaaggccgtaggtcggtaaaatccgaatcgcttctgacgagaaagaattggccggcccatgaaagaagcagtcgtttcagacagactttcaaggagaaaatacaacaccggaaagaagcaaacaccgggtcgtaagaatattgagctcgaatccttgtagtttcaactgtcagccaggtgttcttgggtcgtgtcgggtggagagcttctggattacttacttctgccaagttatagaataaacttccacagactagagcctgtattatagctgacccgactttcacaaatagcgacagtttatcgccccagataacctgaaactgacgaagagcacaagcggcaatttgatcacagagattggctgtgtaaacactgttgttccgaggaatatgctgtttgcgcttttcactagatactgccgtctcaagatcttcggcttcgtagctcagcttctgagggtccacgatagaatttatttgatctttgcagattgagctgttttgatagcagatttcgaagtcttccggtgtattgggcaccttctcttcccacccgggtctaactgtacgttccgtaacgacagtgactgatgtcaggaagtccgcgacatttgcgcccttggggcagatgaatccaaggtcttcaaaatacttccttgcgatacggcgagggccgtagtaagtgacacgaccttcagctaggacaaggaccttgtcgaactggtcataaataccgtttccggcttggtaagtagtcgtaatgattgtcttgtcgtttcgatccgcttcgcgtctgagcattcgagcaaattccacagctgatttcgaatctaatccccgagtgggattgtcccacatctggactggactttgcccagccaggacctcagcaagagaaacgcgcttacgttcacctcctgacacgcctcggatatactcgtttcctactaggttcttcttggtgtgtccgattcctagtgagtccagaatctcatcacgatgattctgcacaaagtccttgcggttccttaggtgctctgggcgctcattgggaaccttgtttcgaagggcgaatttcattgtacggttgacagttagggttgggaagtgaacgtcgtctgtggtgcagttagcattgagctcgatatatctcaagtgaagattgcatgccttcgttgttgaacatgatctgctgacggaaccttttggcagcttcgtgatccatgctcccgtagttgacttcgccggtcacttcatcaaaactatcccgatcattggagaggactctgagtagggaagtgcatccagagcctgggcgcccaagcacgagaagctatattgattagttacaacgttcctattctcgagttgtgggagcataccatttccccaggcttgacctgaccgacaacatctttgaggatcgtctagaaatcaagtcagtataggataactggaatcatagtaaagtatgcccaccctctttgggcgggcgccacgcttgaacagtgccccaatctgtcgcgggtccacctctgaccataaagtgcttcctaaagcagcctcaggtgccgtaactcgaacgttaagatcgcggaacgtgactgtaagccgtttgcgaatctggtcatcgccgtgttccagatcaacaggggttgttgtgccggacgatggagtttccatgacggaggtctgtattcctgaaatagaaacgaacgactacttgggatcgcaccaattaaagtgggattggagggaaataccatgatgtcgaggcgcagcagacagcagaactcttatattgcgcatcttattatggcatctatgcttttaaatccatattgccgagagtgggtcttgctaacagatcacatcaagcatgtatcgctgtagcggaatttatagataggggaaatgccttgaaacagctaaaaaactgcaagtactattgtgttagcgaggatatcactggggcgcggtgctcggaaatatacgaacggatatatgagcgacccacttggtcagcaacgatcgttgattcgctgattttctatctctgcgcctttcagagcttccagagcttcaattagatccacccttcggatatagatccacttgcaccggtcaccgatttctaattccgtggatgatccccctgattgagaccaaatatatacagtttgaagaagtcgtattctaggttatgaaatttcctggtgtgaggcccatcagaggactggggcagaatttgactgataaaccgaaaaaaaagcatccaggtccatggtggagaaatcgaaatcccagcccatgtcagactgagtaaaatcaagcaagtcttccccggagcccgcagagcctccggtcgccggattttccagggtttccacctgtgggaggttccaaggagagtttgatatgccaggccgcattcctattgacaggttctgaggaattggggggtttttgggtagtaatcgatgcctgccgtcagaagtgagcccttgctgtatggctgtccctcctgggggcgcaatgttatccccagttgttgctaatagaggtacccattcgtacgatgggttgatattgcgaagcacagtctgcatggctgcaattgtgcttgcgatcgggtccccagctcgcatagttgacaaaatttgcattgaagcataaactcatggcaggtagacaggcgcgacattcgggttgtgaatgaactcatagatgagagtgaataccgaattaccgaagaagtacccatggtatcgtaattcctacgataatgttagtggaacttttataacaacattttgtctatttaccagaacaagattattgactcttgaagcttcacataagtgatggagtgttttttgggcagcagtgatggcatggttgcaggcttcgttgagccaagaaggtgtttctctggggtaatttgtgacatgggtgctagactggttgagtgcgatattcctctcgcgctgccaatggccgcgaaatatcaagaacgggcgaaatgtaagaagtagtgtatgatagtatactagctatggtcagagtaaggtcaaaaaagtgccgactattcacttacaggtaatgaaaattgtttgtcgaaccccaagggatcccgcctggatgctactatcaagaccaagacccaaagcttgttgtagatgtgcttcatgaccacggatgtcgtccgcaatagaccgagcaactctccacatgtgcagaagagactcatgccgctggccgtatatctcagtaacagaacgagtgatggtcttgcaaagctgcaccaacaatcgaataaacggatcctgtggatactctattgcgacatctttaagagatatagagctaggacgtcccacatgaaagcagaaccagctatgtatgaagttagcgagttcatcaagtatcgaactgaaaagggtaatttacgtttcgtagatgtaaagagaccagaaagttacccgtcgttcttcaatattttccggggtttgatcaacatcatggggaacatccttatgcaaacctgctgctaaggccttgcgagaagcagaacccaaatgtaggaaggctgagttgggccgaccttgttcattctggtaattggcgtaaaatccatgtcagtctgtaaacaacaagaaagggtgataagaacttatcatatgcaatgagatttggatagtctgaaggttcaccacatcatcaaacgcggttaatgaagccttgacacgctcaaacagcacatcaccccaggcaaaatgatccgtgccaagtgccgcgcttgccatggcaaggagaaggatcgcttgggcgaaagcatctagatggtctgtgggcgaagagttgtagagtttgtccagacattgctcataatatatctttgggcgaagtggcatcagatgataaaggctggagagaaatcgcgacagaaaaagcttagccaagtcgtacggcagaaacatcatagacaaatctcctttcccgagggacttgttctcatgaaagtctggtgtcccgaagaaaatgcgacgaaagctgaacaaatccaacccagctccagcctcctcgactccgccagagggttcaggctgggaggcaggattggagacgagatcccggtagatatgctgcatgagagagaaatgagatgtggggccatagtatagctgcatccgacatgacggtgatgccatatgtgtcgcagaaacgctatttgggaagtcattcatgacggaggctgtgcgctgcggcactccagttggagaagcttgacgaggtgaattcctctcggtggcttcctcattctcatgtttctttcgcctgtggcgaatatagtctctgtatatacagggtgtgttgcgcagttggcaagttttacatctgatgttatattagccatgtattcactatccgagcatagaccaaaaaatctcacggggtcaggccattgcacttgattttacgtttgcggcattcttggcatgcgcgagggattcgccaacctgcctgagctttatccgatgcctcagacatgaataaatttgtatgcaatctcacacctcctatctgtgcagttcatccgtttaatccgagggattatccgtatatatccgggtcacgtggtgttatgtcatcaagtcagaccacggcggtgtatctattccacgtctgcgtacgttggagatcaaaactagttctctccctgataagttatgtcgaactccagaagtatctccaagtttatgatatctgaatttgcgctcttatatcacatgacctagcaccttgtaacagacgcatctaaatccctactcgaggtcgtcctaagacgtcgcgcatgaatcactatctagtacggagtactccgtacactcttgaaaatagcctcaactcatccgatgcgagcagctttgggacagcttcgggacaagttccgatcggatgacatctttccgatgcatgtttcttgcaagactcggggttatggacgatcacaacgcctgaccaattctggggttatggttggtcaccacgacgactaagagatagtcagatgaggggatcgggatttcccgtacgaagtgcctaggctgtacctagactagggcttataatccattcggataaccccacaaagccaatgatacaatccggggtggatccacaagtctggggaaatctcgaagtcatctggggaaattccaagcgtggcttaccattgatttaatttcgctcgaaactttagatctcggagactttggcgtgctaacaatttttatgattgggtcttccactgccagttctgactagcaaggcatccctctcccactgggagcggcagattgggatttcagctgctgaaaaagccgaatatcagttcggaattgaatccgtgataccccacaacactagactcatcatctagatcttcggacctatataatacccggtcgccccctatgtcttccgtgatccctgtcatctgaaaacttcagaccgcccttttaccccttccaacctcaatccactgtcaggtactccaacatggctgacgccgagagaggcaccacgcctattggtgacgaaaaggtcattttagaccataaagagtatatgatgggtgaagtcacccatggtgcagcagaaaagggccaactcgcgactgacgaacatggccagcccctgctaaaatttgacaaggccgccgagtcacgattgcgactcaagattgatttatatattgtcccaactgttgcaatcctgtatctcttttgttttatcgatcgagccaatgttggtatgtaaccaaccccggttattattattatatcccgagttctatgtccagttcaaacactaatccgtttcttttctggaataggcaacgctaaattggccggtttcgataaggaccttggactcaagggctatgattacaatgctgtgctctcgatattctttatctcatacattatctttgagattcccagcaatctcatgtgcaaatggatcgggccggggtggtggctaccagggatcacattggggttcggtatctgttcggtcgccacggcttttgtcactgatatgcgcagcgcatctggtgtccgcttccttttggggtatgtgtcctagagttcgcaaaatcgacaatgctaacaacctctcccttagcatgttcgaggcaggactcatgcctggaatcgcatactacctttcacgttggtatcgacgaagtgaacttgccttccggctatcattatacatcgtcatggctcctctcgctggagcgttcggtggtcttttagcctcgggtattctcatgctagatcattttggttccctccgcagctggcgtatgatctttgcgattgagggtatcgtcaccattggaattgctctcatctcattcttcacgttgaccgaccgacctgagacagccaaatggctctcccaggaagagaaggacctagccattgctcgtgtgaaatccgaacgtgttggcgcgaccgaggtcctcgacaaattcgatgtagccaagacactgcgtggtatcttcagcccagtaacaattgtgattggggtaatgtttatgttggacaacattaccgttcaggggcttgggttctttgcgcctactattgtcaaaaccatttaccccgatgccactgtggtggctcaacagctgcatactgtgcctccttatgttgtcggcgcgtttttcactgtgctgttcccctacctcagctggcgatttgatcatcgcctaatctttttcattatctgcccgccgctaatgatgaccggtaagtctcagctccttgagcaaccttggttgcaaagcacaaggattgcagggtatactataccaggttccaggctaatcattacggggattgttataggttatatcatgttcctggctagcgaagccagcatggtccgatatggggccacctttattattgcgtgtggagcattttcctttgggtccctatgtcctgcaatcgcatcggcaaatgtgatttcggacactgcgagatcttcggctattggaaccacggtgatgttcggcaatatcggtgggctgatcagcacttggtcgttcttgccttttgacgggccgaactaccctattggtaatggtctcaacttcgcaacttcaaccgtcattctgcttcttggggccagtctatgggcatatatcatatgggaaaaccggcgccgtgcgcgtgtcgatgtccacagcgccttggcgggactttccccccaacagattcaggacctggactggcgcaatcctggtttccgcctgcgaccatagccaggttctatacctcgggtaatcgattttgccccggttcatgaccttagaactcctcactagccttcgtctcgaacatacaatgaattattggcaaagacataggctatctgaggactccattggcgttatacgcgtaaaattctctagatccagaattcttcggttcatttgagcagccgaagaatgaaccaaatgttctagagctgtacgggtcttacttcaaagatccgtggttggcagacttgaataacgaatcacaacaaacatatttggccaggaaattgcacatggctcaaaggattgccgatcatgtcggtacggtcttgttcattacaaaacacgcgaagaataactagaggctttggtgatcggcgtgtccaagcgcaccccacgccaaggaattcgtctttctttcttgttgtggtggtctgtgaaccaatcagtggcttcaaatcattcatggatggggttttctctagttttcgccccgcgataaataagccacgtacggcacagacattttcatccggacgttgtccgaaactcactgtcaaggttcgatggaggaaagaatagacttggcagatcatgtactccagtacgtcctgcgtcggagtagaatgtcaagagtatctgggaatgaacatacaagacaggaaacaagcgagccaccgtgaccctacagtgctcgagggaagccgcacatttcaatccaagggaacatgtggtgattcaggaactcggccatgttccgttgagatatccctggaacgagaaagacggcaacttcggacttgggactgaagacgcaagctctcttggcgctgttccccgggtcttggcttgtcccggtgtatcatgtgtatcatgtctcaccagtttacggctcatttggactacggagtacagggatctttcggtcttgacatatttctcgggctgggatttccggtccccagatttccccgcatgtcgtgggaccaacatctcatagctataaagaccccttgctctggctcacgtttgctttttttcctcttctcctactacccccggattatccccgtattcaactacatacttgagtgttgcccatcatggctggcggagcaaagaaaccagtcaatatattccgcctcaaagacctgggtgagcccaaggaggttttcaactggcgattatggttctcggtcatctcatttggcctgatgggcgctgcccgaggtgtcgatgaggggttgatctcaggtgccttcaattctaaagactttcaacgttacatcaactatgactcgtacagccaagtggaacagaccaacatcaagggaaatgtcactgcaatggtccagattggatctgttggaggcgctcttttgtgggttcttccttgatctttattatatcggatctcgtgtcactaacccggtctatttttatacagtgcgttcttggtctgtgatcgcatcggtcgtatctgggcaacccgccaactttgtgttttatggattgtgggaatcgcggttttcatgggtaacggtggcagcttaggtgctgtctatgctggtcgctttattgctggactcggtgtgggccagacagttgtcgttgctcctgtatatcttgctgaaattgtgagttgctcattaccccagtaatacatccatatcaactaacgaagaaaggcccccgcttctatccgtggtctttgtacctgtgtcttcacaggctttgtctatctgggtattgtccttgcatatttcgccaactatggttgccaaatcaacctcggcgacaacacgcacaaccgatgggtatgtgtgatccactccgtaccatatattatcaatactgactagaacagctcgttcccacgagtctgcatattatctttgccggcttgatattcctcctctccttcctccagcacgaatcaccccgatatctagtcaaacgcggccagctcgaaaaggccatctccaatctctcgaaaatccgtggcctaccatccgacgatgaatacgtcgtacgcgagatatccagtattcaaacgacacatgcagctgagatggaggccacaatgggttctggcgctatgggcgtgatcaaggaaacattccttgtcccatcgaacctctaccgagtctacctcacattcatggcccaacttctttcgcagtggtccggagccggcagtatcactgtctacgcccctgatttgttcaagttgctaggagtcacaggcaataacgagtctctcctggtcactgctgtgttcggaatcatcaaactggttgccgcaattctctgtgctcttttcttggttgatgttattggacgcaagcgagccctcctccttggtatcaccctgcaagcaattgccatgatctacattgccggcttcttgacctccgttcccgaaatgggagtcgacgagagctacaaggtaccggctgacaagaagagcgctagcgagggcgccattgcaatgatttatctctctggctttggatgggctctcggctggaattcaatgcagtatcttctgactgcagagctcttcccactgcgcatccgtgctctttgcacttctatggccatgactctccactttgccaaccaatatggtaatgcgcgcgcagttcccaatatgcttctgcccgtcgcagagggtggaattgaccccaagggtacgttctggtgctttgctgccattaccgttatcggtggtgtctgggtctggtttagtattccggagacggcaggtcgctcattggagagtatggatcgtctctttgctttgccgtggtacaagattggccggtatggtaatcgggatgccgatgaacgtgacctggtagtggatgagaagatggagatggcggtgcagacgcatggaacggctcaacatgttgagaggcaggatagagagaaccgagtctgaatatcatctagatatctctagtattcatttgctggtcatgattaatgaaactaacatcatgaataaatcccttttgaaatataacaaccaactcttgccccattagcccgctgaaatacgtgaatagtgcttctgttcccgccttatttcgaccattccttcaaccccgattgtcagaattccccgttgacgtcggcccgtctagcggaatgatcacaattctcgccttgagcgcagccttatcccgagacttcctggtagaccgtgctgatccctcacttgtgcgaatatccatatattccatatcattcaaatattcatccggtaaatcgacccggatcagaacacccctaggtccaaagaccgtctcgttccactgcgaaatatgacgagcaagatgctcaccacgagctccagccattgccgagatcagattccgttgttctcgtcgattcctggtgaggcgggcaatgaatatcgcggggatagcgcccagaatgccgaccatcaacccgcccactgccattgtgcccaggcctctgccaatcacagtggtccactgccgacgtgaaagcttagcttcgtcgcagactacttgtgtgaactgcgcccaatggtctttggagatgccgtaatgagagagttcgtctggatactcgaatcctgatgtgcaggcagcggatctggatggtatttgcaggcctcgtctcagagcagatgcaacagcaaacccgggctcacttttctcgggcaggaagattatgggattgtcggtcttttcatcgagggtggaattgaattcctcggacggggaatacatcggtggggcatcgtaatgtccagacgtgttcatagttggtgaaggactgtatagatacagctagtatttcttttaatgaagttttcttcttccacggggaaggattgatttgatattgaatgattttccgatttttgaacattaaaaaagggtcaccatcgcaaatatttatatttctgcttagccaacattcccaagcctcatttttctaagcaagcttttccccctcaggtatgagtccgtatgacttggccagacaccgcggcggtgttgggaggcttgtttcggcactcggagccatcaaaaatagctttcaaattggtgatgccttgtataggccgcaatattttgcgttcgagtcacttttgggagaccaatagtgattgcacgcgttacgagcaagggtccagatgcggtcatttagtacgaagataaggccgaactagattctcagtaattaagagtgaggctaaatcgaccaatagagtaatagtcaaccccgagatatctcatttccttcgtatgtctatactccgagctccgcgtgagtcacaatttctcacaaaagggacgtgcaccaaagcaaacaaccccctgagccatcaaggcaccacctttctccccaaaacttcctcaaatcacatcatgacaacgcgttatagggttgagtgtacgtcatcgcgtcttttttatctcgctgccctccactaacgtctcttagatgccctcaaggtacggctatctccgcaagaatatgtgtgcccctcactgacccatagccatgtagacccatcgccgggatcaactagtaagtcggtactacatatctaaagattaaagagtctgcctaacaatctgcagatcgaatggatcaaagtatgtcgctcggtcatgtcgtattcgccgattctaatccctctagggtctgctggccgtcccctttgtcctgcattcccagcccacggcaatctacaaggacaacggtgaggtgctgaagacagtcgcggccgacacccaagttcgctatgcagagattatgcgagatgtagagaatttgatgcttgatcatagtaagtggggattagaaaccaaagaactcggggatgatccctaatcggtacttaaagtccaacaccatgaacgcaatgcccccggaaaatcgaaattgaaccttctggtgccgtcagtgggcacttttttcaccaagctatatctggaagatgccttcaagtatcaagatcagcagcgattcatcagccgacgacgcttcgtggccccttcattcaacgatatccgacttattttgaactccgcccaggtgctgggtcttgttcgctccagcgaggtgcaactagtcacattcgatggagatgtaacgctctacgatgacggcgcctgtctcacatccgacaacccagtcatcccacggattttgcgactccttgaacaagaccgcaaggtcggcattgtgaccgcggccggctacaccgacgcaccaaagtattacgagcgccttcagggtctgcttgatgcgatgcacgaatcaactactctcaccgcagatcagaaacaaggactgattgtcatgggcggcgagagcaatttcttattccgcttcgacccgacatcaaatgcccgactaacctatgtgccgcggaatgaatggttgctggatgaaatgcagtcctggagtggtgatgatattaccgagctccttgatattgccgagtctgctctgcgagcctgtgctgacaatctcaatctgccggctgctattctacgcaaggatcgtgcggttggtgtttaccctgtgaacggtgtccgaatcagtcgcgagcagttggaggagactgtattggtggtgcagaacacgattcaacgttcggctgttggggcaagattgccattctgtgctttcaacggtggcaacgatgtcttcgtggatattggcgacaaatcgtggggtgtgcgcgtatgtcagcgctatttcggtggcatcgatccagctaaaacactgcatgttggtgatcagttcttatcagctggggctaatgatttcaaggtgggaagactatagaactctccttggctactggtcagactaacatttcttctgattaggcccgtcttgcatctacaactgcctggattgcaagccccgccgaaacagtggagctactcgatgagttggagaagacagtatactcgtagtcattgaactccacgttgaacggtggaataatgcatctttctggagttcattatgtgcaagttcagtgtcaagtgttacgattgatacaccgggctatctttggactacctcttttatcctcacgatagcagtcgcccatagcgtttttaattcatttgaggtaatttcaagattcagattgatggttctatctacaacgcactttatgtcgcagatcaacagtcttcaaggggggtagaaaaccatcaaacaaaaaggcacgatcatccgaactcccaggcataaatgtcactcacgtaaaccaaccttgggtctcgaggacttattgcatagcaccatacaacgcgtaacggacgttcagtgcgatcgccctccacatcacaagttagtggatggctcgccggccagtacttgggggaacattcaagcatatcccgggtgtatcattggcgtggattccattgttggttggaaataagtggtcctgtgggtggaaatcctttcagggggagctgggaaccgaggggacagatcggactgtcgaaggatctgaagagtaggaaacacgacaatcgttaacattcgtatgagggggacaccagaaatgatcattgtacgggggagcaaagcgagcagcgacgaaacgatttgaacagggatgaaaaagcaaataagcagggtcgcagtcggtttacgtactctcgtagcaggaccaggtctcgtttttggtagcatgggtgcgtccagacagaacattgacaacgtcctgtagttcaagccagaactcggacttagggcgacgtcggacccaatcagtctcggtagcctccagtccagattcaccacccatgggggagaatagcacctgtgaacctttgacaccaatgacagcactagagagagggtctgcggcaatttcatcaccgctcttgttggcatatccttcgatgtgctgcatgcacctgatggccatacgcaaagcacgagcacgatccattggcgaaggcataccaccttgttggaagtgaccgggaacagcggcacgagactcgaatcggccccttgcctcttccttgataatgtcggcgatcacttgcgtagtgtatgtgctggatgcacattcgttacgcagaataatcttgcctgcacggttagcgcctttgtcgcggatgaagttttcacgcaggaagtctatgtcacgcgagagcatcttgatatcaacaccctcctcaggaatgtacactgccacggcaccaacagcgaggccagctgtggttgcaatatatccagatttgccaccttgggtctcaatcacaaacactcggcggcgagaagaggaggcggattgacgaatcgcatcacagaagacggtcagggtattcagacaggtatcactgcccaatgagtattcagtcccggggacgttgttagaaattgtagctgggagcacgatgagcggaatcttaaacgcatcatactttgcacgagcctggcgcagttcgctgacggcagtgaaagcctcgaaaccaccaacaacaaacaaggcatcaaacttgtacagctcaaagcactgggcagtgccctccatgtcaacagacggcagggtacggttagttccaatgtccgaaccaccctcgttaacccagctatcagcttccagccaagtgacctcgcggactgagctgactggcttatcgtcgtggtgacggcataatccggggaaaccgttatgaatggccagtggggtgtggccatgagtcaggcagtatgcaacggcggcacgggttgcttggttcataccaccagccggggcaccaacgtgaatgatagcgattcgcattctctatgatatagtaagtatctagaaagcctgaggagcccggatgcgctatggaattaggtgtataccttgccttccggaagaatcatcttctggtcctggcctgcggtgtccaaataggcgttgtagtactccttgaattccggatcacgcagcttcatggcctcatcgaattcttttttgtcaatcaaggccgtcacatctttcgttgcttgaactgcttccatcagaggagtccgcatgatcttgttctcgcggatggtgatgactggtgaaggggaatcaggtgacatttcaagcacggcacgaacggcctccacaccctgtagagttgacagccagcggtcataagcgcacgctgcaccacctcgctgggtgtggcctagaattgttactcgggtatccaatcccagccgatctgtgagaatatccttgattttcgagctcgagaccttgttcaattgccgatcctgtgctccttcggcgacgataacgattgtacgacgcttgccgcgttcacttcggttctgtcaagccccttgaatcagcaaaaataaaacattgaacaacactgaagtaattccaaccttggtgattacggcacacatgtcatcctcccagccctcctttggaggcatctcagggaggaacatccagtctgcaccggtactgatagcggacatcaaggcaagccatccacagtgtcggcccatcacctcgatgacgaaaccacgctggtgggaaaaggcagtatcgaagacatcgtcgacggcatcacagatacgggtcaaggacgaatagcaaccgatagtggcatctgtcccagacatgtcattgtcgatcgaacctaccaggcccacaatgttcaagaccttgtagggtgccacctgctcagctgacaactcccccgagctaacgaggtctgccaacaagctgggccactcggcacggaaaacatcggcaccagtcaaactgccgtcaccaccgcagacgaccagtgcatcgatacctttcaggaccatgttctttgctgccttcatccggccagcacgctcacggaatgccatgctgcgagcagagccgatcagggtgccaccgcgggacaaccaaccgcggacatcctcccagtgcagctggcggatcatattcccgccattaaccagtccttcgtatccttcgaaaatggcgtaggcttcgcagtcgctgtgaattgccatgcggacaacggcccgcacggcaccgttcataccgggagcatctccaccagaggtgagaacaccgatgcggcgtctcttagccggatgagtggcaatcttgattggctccatattgaattgaaggcttcgacctatacctcaggtcgatagataaaagaatgagacaaaaagtgattaggaagaagaaaacaagtcgaaaaaaaagaagccgataagggtttcaaagctccaagttatgaatgggtggggtgtggaggggtcaaacccaatccggtgagagaaattgggcggtaggtggatgctttgcgtcacagaaacaacttgaagctaaaagttatcaagttggatttcaagaaacataaggaactgttgaggaaaatgagaaaatgctgaaccggactggactgtatttattcttgactacctgtatatgcctccccctgagattacagtggtctgacccttcatggtacctgcgttcccttacattttggctgcaaacacatgtcaccggtcgatttaggtttagtacgggcggtgagatgtcaagttgacgtcactgatattatttgatttgtttgatttgtttgttctgtttgttctggcccctttccaatgttgctatttattgtctttctcacgagtatgttgtactccccatagtcgtcaacctcgtattcattattatgggttcaacaattattgcacaactagtcacccgtgtacccttggcaaacatggtctgaccggttcattcacacaacctcggtccatatgactcgcactaaaggagcgatgccacgcatattgtcacatggttttccctactaatatcgctcctatacctagaacgtgattgctcctgtgaaactcgattcgctcactcggaagcccctggtcctgtatagagtgttccaccagttgtaagttttttgcagtgacacgttgtgcctgcaactccttgtctaatccttgttcgaaatgctcctcatacccctgagatcccacataagaggtatttacaaaatagctttggcgaaatctccaggcaccatagttatggtacaacaaatgatcttactatcgtcggacacatgcatgggccctcgggtaacagcggaactaaaggcgaagagaaaacaaaagttatccttggattcaacttggcatgattaaaatatcagtgtgatgccgtcttggcgggctaggctgacacctatacgaatatggtgtctccctgaaagaagatggaataccgtgccatttattgattcgtatatcttatcgtgttcatgaaccttcaattgcgactatagaactatggaaaagcaagctaataataatatcaaattccctgagaataaaaacaaaacaacgcccccaacattcattaaaacaacgcactttcacgtacttggtccatcctcattatcagaaaagctccccgacatttgtcttacgtcctcggttctcaatttcggcagtgaattgcccaggcattgcgctcgtagtcagaacacggctaacctcaaggtaccgcttgcgaatctcagaccaaagctttttatccttagcagtggtcaactcgggtgatgagtagtaggggtcattccagataaaaccgtccacgagtagtttcagacctgcagggctcttctcgaactttgcgcacctatcgacatgttagcagtatccagcaatattcggtaatagcacccacatattaaaatcgataagccacaggctgattgactgacgagaaaggtcaaatcgatgtcctagcgagcactcatcctctcccgtaatctcatctgaccgtggtattagagacaacaagggggagctaccaagaatgaactctacgtcattgccatcaacgccagctttccagtgtagaatggccagggcttgagccatgacctgggcaaacgcagaggtgtccagctgcaaatcctccatttcgttgacatgtagcgggaaattgcgtaatttgaaatccttcacattcgggtcggtcctgttcctcattcggcgtccgagatagactcgaatcaagcagtgcttgttctctggcttggcagggaactccgacttgtactcctgaagggttggagggcaaagaacatcgactatagcttccctgactgggagagggattggaaagacacggcttgagatcagagcgaaactctgcacatccatttcccagctgtacaacttgggaatgtggatctccagtttcatcagattttcaacatcgttcattgcttccttgacagaggcgtgcatcttgaagtcagtaagcagttgggggaccttacctggggagttgggaagtttcgcgacggtatctgttccaacaatggcgtagacagtaccgcactgtccttgtccgatctccaggaagcgttgttgcgacgggttatctcagactgcattgttcagttcttcgaggctagaggtagttgatatgtaggatttagtcgatagcatgcgtgtcaggatatcttctggctttgcggcagcgatgtgctccggggaaaagagggtatcttttgccaactggaaaccagtgggagcaagatccttgatcgattcagtgatagaatattccgaatcgtcggtactggcctgctggcgatccatagtatgaggacgtcttgctggtcaaagtgtcaagaaatgcatgtaaagtcgtcgtaaaaagtaagagaaaagtaaaggttcagggaaaccacgaggtgcggacaaatcggtgggcgcagagaaaagtagaggtgaagagaagagcagaggtagaaaactgcctatctaggtaatataagaagacaccaactttggaaatgtaccgcccacctttacaggttgcaggtttccatggatagctctgcacagaaacccaaatagtgtgtgtgtacttcggtttatcccagtctgcagtagttcatggctgcaactaatatcctctctgccagtttaccttagctatattgtaagcaaattaaccgcatggttgagggaatcttcgagtccggcagattttggtttcgtgcgttgagcttacagggttgaagtcaaccctggcactttttgttcctcacacgagcggtacaaacaatgacaatgggtttagaccaggcttctataccaccgaaagtctaacccacagtataatctacctacgaggggggattggcgccatcaaagtttttgaagccccagctcttgtgcgcgctgctatctggcagcctagtctagaagactggcaggcttgggtgacgaggtagctatcgcgtccgccggccattgctagccgtccagccccaccgcagtatgatactgcggacctcatccctggggccactagggttacgcaaactgatcctatcaacgctcgcttacaaatgcccactcagtcaaatgagaaaaaattagtggctgttagctatcaaggctgtcaaattctcgctgactcgctgtacatgattatttttgttgacgcagcatgatcaccctctcgagtcaagcctagatgcaaggtagaacaggtcatatttgcattctctagtttcctttttcaaaaaaatgagacaatcgaagagaataacaacatttaggaaactctttttagaatgtaaacactggacctgtgaacaactgtatccatcacatatccaagatggctgtgaatatactaccatcactccttaatgctggacaccacgggatcgcttatattaagcaccacgctggcgaagttctcgtgaaagagctgctgcactctgggtaggaaatactccgtaatcgagttttcaacagtagccggcagcagatccttgtaaatccaatagtgccgaacaaaatccccagtgcagtttatattagccatctcagggtatccattcgcctcggcgcatgaaagagtctttatttctccctctagcgcagtgtcatatcgaagataattcccgaaggcagcttgctcatgagaccattgctgactccatttggagcagtcggggtatcgaatgtcggtaggacatgattcccacgcttcaaaaagcgcctgggttctggggtctttctgtccaataataaatcccgtgttcaagagcgtttttcctttcgcgtcccgattttgtggttcatctgggtcgagtgccatggcgacgagtgtatcgggcgttatgtcccagtagttgaaaagccattccataggaaggtgcggatggcgaatcatagcatccccatcgaggaatataacaaattcgtaagatttcagggcttccttcatcgccgtcactttactccatgtgccatgaagacccgtagggcaagaagtctggatgagcttgtaatcatagccatgtattgtagctataatggtcagtgttgggtggtaagggacatacatagcagagacgtaccgtatatgtagtggcttagtctaccaattgtgctatgatgagcgcttgtcatgttcagtcggctcccattcaaaagttcacctggtccatcaagtggccgggtatcaacgtccaaaataaggagtttatctctcaggggcttcgtaaatctcggcatttgtggtagtgaataagtttttccattctgatcatcgaaatctagggcgtctattgggtgtatgtagggcctgtaaagattttggataaaggagaactcgttgttcatctgcagcgccgggtattccctacaaatggttagattgccgaatgaagtttccgcggaataacgaaaatacaacgtacctcgagatgtttcggacagagaaattgtgcgaggcaacgaaaaagtaaaacagaccgcatagtaacgccgtgagtgttaacacggaaataattggctgtggcatcatggtcagtgctgaagaaaggtaatggattgtttataacggtgatgacccgcagacactgcgcgcccaagagtgtgaaaaacgaaactccaggccattcctctcggctcgtcttaaatagataggagaattgtcacgttctcgtggtatttacgcaagcgggtggaggtatacgaggtatgtgaactgttttgaattggggataagctatgattccttccggatgcggaaagatcattacctacacaaactaccaaacgagaaaatggcaagtgaactgttgattttgctcttaatctaaagggctctataatttttccgacttagatttcaattatgttttacacaaaaaaggagtgctaagaaagacctagatttaatcaaattagtattatgtcttttgcatttgtctttcaaggggtcctagaggtgcccatagatgtctattgagaataatcagccgcaaactgtagggtagggtgaaaatgatggtacctacggggtatatataaaacaaactgagcgctataaaaaacttaggtagccggtttttagctgccaacagtcgctatccactacggtactccacctttttcatcggcgtctccccttctcttgtctacttctctcattctcttctcccgtccccctcctatcttatcttcagtgttcggcgttcggcgttcgatctcgactcaggggataggaccaaatcgcccaaggttgactgctaaatgtttaaatgcttagcctatccagaaatgccaaatttagacactagataccccggtccttgatacccctcggctcctagcccttatctcccttcccgaggtctcacctaaagcttggtcgttgctatgaataaacagacactgctatggttatttacctgattagaaattttattggttttggaccaagcaattcatgtaaataaataacatactctatcattccgatatcggtataccacacagaattcactctattcccacttgggcagttcgatcctttgagatacgatcaaccccgcatgttagctgcatccatatatttactcgataacagctttttttttttctccaaagaacttgcttactctcgaggaaagcatcaatcgcacatttcgatttgttttaccgaattctgggccttctacatcatttgccatggcgccgaatgatacaggtcagcttgactctgccgcagtataattagaaggttaacacagtctagttttcagcctcgttacggctgatccaggcctaccacgacccaatcccaccgaatcctattggcaacatattccacatgctctcgccaacgtccaatcctcaaaattgccaactgaccgagattttgcgatcattgggtccggtatcacgggtctatcggtagctagatccctcttggaacgccaccctactgccacagtaaccgttctcgaagcccgtacgctctgttcgggtgcgactgggcgcaatggtggacagatggctgcgaatgctggagagcagtatatgaatcttgcagaagctcacggggtcgagacggcgggcaagattgtggactttacattccgcaatttggagaagatgcaggaattgattgaagaatatgatgccgtggagttgagcgagatgcaacgtctgcggaagctacgagtctttttgacccaggggaagtttgacgacttcaagaaaagtatcgcccggctggaaatcgatcatccttctaagaaggggatatatacaattttagatgcggatgctgtgctcaaggtgagtcttttcgccggtgtgatctatggtgtcattctgatctttttttctctaggaatacggaattcatggagcatctggaggaacactgcttcctgctgggacagtctggccatatcgtcttgtcaccaaagttttcgcggcactcttggaaaaatacccaggtcgcctgacaattgagacacatacaccggttgagtccgttgagcacatttcaacacttgcctatccgtatacactgcacacttctcgcggtccactacgagcacggactgtagttcattgcaccaatggctacagcggacatctccttcctcacctaagagggcttgtctatcccttcaaagggacaatgacagttcaagatccgcagaatgctgtgccaaatcaaggcacagctgtgtcatggggcttccactaccctccaacctacgatcctgcaacccaacgtcttggatttggactgtactacctaggacagagtgcaaagaccggctatttctacttcggcggcgagcatgcgcgttttgatgaatcaatatccgcagatgacagctttgtgaccgacgactccgtgaagcacttggaagacgtcctcccacgattctttggcaaaaacgacaaatccgattggcgtctggtcagttcctggagtggagttatgggttattcccctgatggtctgccaattgttgggcgattatcaccggagatgacggggaggggaggggacggcgaatggattgctgctgcattcaatggatacggtatggcaaacagcctgctgagtggcgaggcgttggctttgatgattctgggtgaggatgtcagtgattggctcccagtttcatatggactgggcgaaaatagactccgagagacgctcacagtctcaagggccgtcaatggactaaggtcgaagctatgagttgggcacgccggtcctcgctcggtatgttcgtgactcaaatggaagtgcatttcaattcatccttttgtagccatgatttgtacagggtattcaactcttgtctctattatgtattgatttttgccaaaatagatggggaagaaaatttttgcggtagacccactacttcacttcgcgagcgagccatcacgacttcttgctttacgcaaaaaatattcagaaacaaaaagacatggactcgcggggaatcgaaccccggaccactcccatgctaagggagtattataccactaaaccacaagcccagttgattgaagatcggggagcgagtatcggctcaaggcggcatagagtggagtggcaatgtgtgctctctgtgggtcactaccgtgacacagcggcggacacaaaatccattaaagagggttggttgggtgagccagcaataggagatggtttccaaatatgtggcattgagtgggaagagggtttttcccaattcccacgaccggtcccgtcgatacagcgcacggagtagatctcgacagacagttcatgacgggacaaagcaatcttcatcttttttcggctttctgatttggagctagggatcagaagttcaccatgttgagggtaaatcgcttcccagctgcctttcgcttggtccttgtcactttcagactttaatgaaccactattggatgagatagtaaaaacaacatccagcaacaagaggtggttgatggcggcttccacttcttccctctgagaaagtttaccaggagactcaaggtccgggtacttgggcatattgaatgacacatcaaaggtggtgccgaagggggttgaggaaaggttggtgtgaattgcgattgagaaagagccccgaggggtcaaaagcttcccatggaaggtagacagcaagggagtaaggaactgtccaatgagggtctccactactggagcactagaggtttgtttctgcctctttgttgaaaagactcttgcggtatatgctggaggtttcaaccctgctgattgcaaaacaccgaagagatccttgagtaatgactggagccagcgtacatcagacatatgcttgatgtaagctagagccgggcgaataagttgatgttcaggaacaggtcgcgttttcggggttaggggaagcggaagcatagtccgacgacgcaagttttgacggtgggcatatgccaataatatccgaatggtatgtgccaaaccatctgcaagcgaagttccttgctgtgagatatcatgttcgggttgcgaggtatcttcatcagtatcaaccaagtccagtaaaatttcgaggttatcggaagcaggaatttgaatgagattctggcgtgtcgtcacgccaaagctagcgatcgctcgagcctctcggactagctcatgaaacagctcctcttcgtaaacagtatcacgcgcttgcagaatgcgatcctcaatcgttgcgttgccgttgaaggtagaacgcgtcggtctagatcttcccgaaagcttgccatcctgtatcacccgcacccggacaaaacgggctttggatgggatcagtccttcatctaataacaaagccccatcctcggctcgacgtaaggaagcaaggccgcggttgcggaacaccggtgtggctagatttagtcgtggtcagtagatgcttcctgcagtatccgtcacatcggtatgcgctcaccttcgaggaacccatattgcacgcctagcgattgcctttcacgcgggagacgagaaattttccaccccttgtccttgacagccagcacctcattccaatatcgagtctccgacgcgacttcagtttcaagtctagaggcggcctgcagaagcttgtttgccgccgcgttgaaattttggatccgccatccccttgataccgctgatatatctttgattgtagattccggcttcgggggagggttcacgacctcggcattgagggaaccaagaggtgcgacttgcttgaggaaggccgacatggaggtttcggcctgacgcggggcctgcttggatagcaaaagggagacgaagtcgagggcgaacatggtctccatgtgagcttgcctggaaatttatcagttcttgcgcaccgagtatgactttaaaaccattagacagactcacatggcgaactgagtgatctcggcacgccgcttgtacagttgctccaagcgctctgtagagtcaagatcggtcgcatcttggtcactctcgtctacctcgtccaagccatctttttcttcctcctcggcaatcttgtttcggagaacatcttcattcacctcgcgaaaagagccccactgattgttgatttgcgcgatctccacaggcaaggtatctggacgctcacgcttctcggggatagggcgcaaaggcagagtgaaggagtcggccatggtgtcaatgcaccttaataacctccctctgtgaaacttggaaaaaccaatggctcgagaggaaaaataaggaaggacaagtggacgacctaatcgggagctcaattcggtgacgtaagttgcacgtgatcgtacctaacgctgggatagatgctcagactcacagttgactaggtagtttcctcggttggtaaagttgttttcttttcatatcttggcaatatcagtgataccagtaactttcagtctgttagcttggtgggacttaaaagtagccgttgttcaaaatcacgctgtcacagagtacaatatatatctacagcctttgataacctcaacatcacgtatcttaaacacggatactataaacattcaattttctcgattattttctgaatgttcttagttagaagtatgaaggaacctgcaacctaatatgtctacattatactgtatgtctaacctggaggcaagtcccacaaggttctgtttatctacgagtcacgactatccattcccgggacatccccatcatattttctacgcaatcaccacacttcaagcctcccatcctatctttccaattaagatactgcccgctagctttttctgaacattacccccataaataaactatggcgtcgtatctagtgaccggctcttctcgagggctcggattggcgctgatcacccgtctagcaacattgcctaaaaccgaggtggggacaatcatcgccaccgcgcgccaggacaattctgctcgactgaaggaaatttcaagtgcatcagcaggacgagtgcagatagttaagttagatgtcaccaatgaatccagcatgaaagaggctgtggcggcagtggagcgccagttgcaagggaaagggcttgactatttggtcaacaacgcgggagtgagtgactggtccccaaccggactggaaggaatgtacgttgaatatcttatcagaacactcgcttggtactgatttgacagggacaatctgaatgagacgttcaatgtcaatgttactgggccgcatcttgtatcgcgcgctttcctgccacttctgcgcaaaggcgagaagaaaacagtgatcaacatgtgagtatagtgggaaagaccacacggaggtttttatacgacgctaagaagctgaccgaaatataagatcaactactttaggctccatggctatggctgatgcgtttcgacctctgccgtcaccggcatataagatctcaaaggccgccttgaacatgctcactgtacaatatgcacagcaatatgcagctgatggcttcacctttcttgcgatcagtcctggtgtaggtgaagcctttccactcatttgttgatctactaacatcgaaagtggcttcgcaccgaccttggtagcaagcgagcagatcttccggttgaagtcggtgccgagaaggtcctggatatcatacaaaaggcaacgccggagcagaatggaaaatttgtgaacatacatgtccctggatgggagaagcgagagggctcaaatcagtatgatggcaaggagatcccttggtgatccggcagggaatcttttgccacattgcttgatggctacaccgaattatcaaagggaaaagatgaattacctcataggaagtcctccgccacgagatcctatatgccaatttcctttcttattactacttatggtctgtaagaaagatgattcaatctgctagttcatcaagtgtaccctaggtttgtcactctagctacctgatattagctctaggccacattagtctttgttcggctgtcgagttttcacaaaatcaaccaggtcaaagaagctctttttgtagtgccgctgctgggtggtgcgattgacactttgaatgccaaattgttgtgtgtagtccccaaattcccaattgtcgacgaagctccaagcaagggctcccatgacatgcacaccgtcttcatatattgacttgagaatttcagacatgtaggaaagatagtacacgctcctaggagagtcaaatagctggtcagagagctccagttctgcttctgcatgtaccggaaacccaaactctgatatcagaattgggtgtcggaaagtattccacaggtaatagagatactctcggagatacgtcggtgtgatatacacgtaggactcggagcgatacccaatgttccatccgtaaacattctttgtttcttgcttgacgcaatatgggaaaagatcattcgagattgacgggttggcagcgcaagccttgatgccttcctcggccggagatactaccgtagcggtatacggatcaataccaaaaaagtcggatgtgtggccgatgtatttcagttcggatttgctcaagggtttggctccggggagtgtttctaacacagactttgggtactgcttacccaagaatattggatttgcgaagatacccagttgtatttcttggaagcggtcagccgcgaggacatggctagagtttttcggatccttaggcactccaaagttgtcgttgaactttatgccaatcttccccgtggcattcaatgtatcatgatagaagtggtagatctgggaatgtgccttgacaacgtggtctgctcctttgaaattgaatgcgtagagcaggggctcattgaaggtcacccagattgggactcggtctgcataatgagaaagcagaacctagggagtgatccacgtcagacttggatgggaattgatgacttgtggaatagaacccgtacctttccatagttgacaaatgcgtcgacaaaagtttcgttttggtagccggcattgttgtagccgatatctgggtgtcgcgtgatattgtcgctggcgacaaacattaatgggctgtcgaaatgaagcattgtgacagctggctgcaaatgtattagaatactggcatttaacaggtatgaattgaggtatttgggatgtttaccgtcattcctgcatcgagaactgtgtcgatcaagtcattataatgatcaatggcttgttgattgacaggtgttcccggaagagcaaaaggcaaaacccgcgtccaggggattgtaaagctataatactcgacacccattgcagctagtcgctgtatatcttgcttatacaagaaataattttcgttggtgacatagtcctttggcttgctgtcgggtaccaatttctccaacaacgaaggtgatcgaccatccaacccaattgcaccttcaatctgcgccgcactccctgcaaccccaaacacaaagtccttggggaaattatagcagtcggtaggaccaaaatagtcgcgcggtggcaagaccagctcactgctgggcacgggtgtgggactgacagttgtcgagaataacccagtggtggtctactcaagtaagctacaactgcaatttgcgaggaatcccagagcacacgacatacatagttgtgaagatctgcctgtagccacatcgaagaccacgcagcttgtccatatgggtcctttgtgtcagtggcgctgataacagtttgccccggaacccagctgccccacgttgaggtcgaccagctagtggtaaaatgtttgactgcgtctgtataacgtgggccatatgtccgtgtggtcgtcggggaaggaacagaggttgcgtatctcatacttcaattagcaagcgatggtgtacactagttctacgaatttcttaccgaactgtttcgttcaaagtataggagaagggctgaaattggtatttcggtgccacattcgattgtgtacattgtggccgagcagaataacctgttgttgtcaagtatacttcctgtgcctgtatagccacagccaaagcagcaagggaaatgaacggcaatcgcatttctgaggtatctattagacagtttttccgtatcatgcctaggaagcggtcccctcaaataatgattcccctcagaggtcagtgtgtttgccggttaattgtcggcccatggtaatatggcgtcaaactcaaattaaggcttcaattggaacgccaagtgccaatgcgtcacgtaactagcccttcatagcgctgatcgacagtaccgcagacgaagttggtaaggaggagctgcaatgtccgatttcctctgctaggggcactggacagtccccggcttccccgcatcgtgcgcccttgcagatccctatatggggtcgcggatatttatcctgttgaataagaaccttgtcccgaggagattgacaacgctttcgctacatttggctgccacgtcatatcaacgcgtccatattgtaccctggataattggagaagaccgcaatcacgcccatttaggctgctcaggcacaaccgtaccttggagaactgtcattctaatgtaattatttgaaaatttctggaaaatcgacctcgaatatgtcggtaaagagcaggggaggtcgcaatgtggcacaagatattggatttgggtcatagtacattaatgagcggctatattcatcaaactgggcttgtggtttagtggtataatactcccttagcatgggagtggtccggggttcgattccccgcgagtccacttttttgttactgtttttttttcatagatctcaggttattctagtcaagactgaaatgaatgaactatatttagtaaagcagtccaaatgtagtcaaattcatgccacgggatatatttcacccgtctactcctcccaattgaaattaataacaatccggccagccacctctcccttccgtagtttctccacagcctcgggcatgcgattcagtgggtacacctcactgatttgccgtagagcccctcgccgtgcgaaatccaacgccatggcggtatcactacggctaccgacaagggtgcccttgatggtaagattcttgaagacatactggcagggatcggctcctatcgtcatggaccctgcaactggaagaccgatgcacatcacaatgccgccgatacggtcgccgataaacgacacggctgttttgtaagcagcaggggctgtcacaaacactccatgagccccgaccccatcagcaattccaataacagccttggtagagtcggcaacttctttgaaatccacgaaggcctctgcccccatctcaagcgacaatttctgcttggattctcccgtgtccaccacgatcggacgcattcccattgctttagccagctgcacaccttgaattcccacaccgccaccgccgccagggaaaacaacccaagcccccgagcgaaggttagactcaaccagagaccggtagatagtgctggcactgcacataattgggcctgcaatttcgtcggggaccccatccgggatcggtgatgcatatcgtgccggtgataccaagtattgctggtaagtacctggtatgatgagccgcaatccagagcattataaatgattcaagtcagccttacctgtcgtcatcagaccagtgagaattgcgcccttgcagtatgtctccttatcatcccagcaaagcgcacaggaaccgcatgtatccaatatcggtttaattccggctctatcgcctaacttgaaagtcttcacgttggctccaactttgactaccacacctgcaccttcatgccccggagatcgcacatcaaacgctgacatgaacgggagacccagatctccttgcatcatatggatgtcggacgagcaaagtccagtgtagttcagcttgatcaaaacatcatcggggcctacaccagagcatcagtggccgtgaacttgtgtacagtggaatacctgacacttcagtcaagattggggtcctacctggttctggaacaggcactgtttgtacctcgacatggaaatcggggccttcattgatcaccactccggctttacagtgggtgggaatctcgacttgagagtaatctatgaccgaacccatgttccgagaagctgtattgcaagactcgaaaagtgcaaagtgttgtctggaaagtctcaatggacaatatacaaaagaattcacaggagaaagtctaagttccacgaagtcaaaatctggggaaatacaaaatataccgtgatcgtaacccctctttttgttggtctcgtcgtcaatggcttggcttgactgaggagtagggacatacgtgccggataatgtctggcactcgacacctttccacttccaatttagctcatctcttgccgctttttaatcttacaggaaaattgaagccgctaaacactctggaaaagggagactgtaaaccataagaatacattttgctgccaaccaggagtgatgccaatttgaacgatcttgccgtccagacgtttatagaaaaacacttgacaaacaattgagcctgtctattgaacgcacccgacggcacggcaagcagtccatcctcgactgctttaggtgctgttcggtggccaacacaatcgatacccctcgtggtcatcccgcatatccacagttgctttccccgcatttgttcttgacgcactgcagtagagaatgcactttctaacgttggtatacggtgtctaagttgtattaatgatgattggtctcattgacgataaaggtgtatgcgccccactgaagtacgtggctttcccctaatttgagtctgccagagaaaggaaggtgataatcgaagacaaccatcgttttgttccaataggagtgcccatcagctagggaagatcccgtacatatacggagtaggtaggtacatgcgtatacgggggatgcagatacaccggaattcgggaaatcagggaggatagaacagggcaagtcagagcgagaatgatgatatgttggattcgaaaaattattcacagaatgccactaacctcatcgtctaggaattaatataaggggattagagagccgcgaaatctatgtcgacaccgaaataaacgaccgaggacgaaaaaaagaggcaagaaatgttaaaagagatatatcaagttcaatcccaaatcagccatccagtcgaaccgccaatggcaagcatgaatagcacggtcaaaatacctgcaccagccttgtcgcctgaagttatgtcgtagtcgagaccgggcggaattgcctttgggggcttatcacctgcattcgggtttcctttactggtcccaccgtcatcgttagtgactggggctgccacatgcgtgatcagattcgcttgaatgacctcaagggcagccatctgctgaccgaagtctttcgtcttatcccatttttgcgctgtccacttcataccacacacattcttattgataccaccggtacaagtcttggcagcggcctgagcagaggcttttagccgtttcatgactatatcgtatgtgaaaggagccatctgggcagtttgagccatccagcgggacaaatatcctttgaaagaccgctggtcgaccatgcaagtattgacagtctcgcaggctctctcgtacatcacgtcgggtgggtcgtgagagaagaaaacactggaagaattgatgatcctctcggtgcgatctttccatttaggatctccggtctgttcatagcattagattggataatgtagtatcggaaggcctcatcaggtcgagttcactcaccaaattatacatattagctgcgccaagcaagtatactccagcgttgtaagtccattcaatctggttgattggcttgcactcagtgaggtcactagctccatcccagaagcgatactcgggggtcatgaatccaacctcggcagtccagttccaggccttctcagcccaatcgtggtacgtttgattgttggtgtactttgccaggcgagacgcaagattgaaaaatccgccagtagagatggtgttcttataattgtagccgttattccatgtaaagatttgccagcgcaagccacccccacacgaagtagtgtcccaccggggaacttgagtgttgaagacagcctgggccatttcaagccactgaggttggtctgctggtgggtttgggaagttccgctccgctgcagtcatagcagcaaagccccaaaaaacctggtcgtcgtttccttcagttttactctggttggccggcatgaatgctttattctctcccgcctgccagagcataccttgtatcgtgatgttgttccaagtatcatcgcccgtgtagaaccagtaatcgataagggcgttgaacattgcaccggcctcccaccaatagtaaggatccggcaaattacccgggttgtcaccggggttcataccagtgtagtaactcatcatgttgttggcgacctgtttggctgcttttttgatagaatctttgatcgtcaattagtcgttgcacagagagagactggtgacagagtggaacactaacctccattctcaagatccagctctatcgcttgcacagttgaagtacccagtagagctacagccagtagacccatccacgaaggttgtgatgcataattgaacacgcgcatggcaactgatatacgccttcgcctgatagaaagcgtaacagaaactgcttgcaagggtctcaagaagaacagctaagcttggatttctcaaggatgccgttgaaggttggtagcgacacgtctccaaaagtcagtgcagttattggaagaagaggtataaagtgattattgatacgaccatgaggctcaaagtctcgttaggatgaatagtatagcttggccccggtctttggcgagatgaggatactgagagacgaagaaaagccgcccagccagcgtcaagctccccaaaatgaaaatgagaaagagatgtatttgtgggtggagtgagaaccacattccaaccgtctaggagcactggcatggtaacaaggcgtggtttcccaggccatttgcacctcctgtagggggaattgtatgagtgtaccttgaacatccgactgcattaagaaggagtccacaattgcattgtagttatatccaagattggatgacaagatgaggagagtgcaacgcgcaacgtctcatttccatggtttccttattggcgctcccgataagggatcgctgtggcattccagagcagctgtcaaaaagatcaatttgatccaatcgagaagactggcgaatcaccgagaggggcatgattgatcacaggagacagtggataaagggcgtagacaggatggtctagggccgcaaacgaacgagatgcaacaattgacgcattccgaagttgtaacttgtgcccctgtccggtagggcctacgctctatggcttgtccttccttgcactggtgaattaaatgagtacaattgtattcctattttgtctgctgtaagcaaatgccagccgtgttgaaggagttgtacagtgcaggggttaaagcctacgagttctcggcataccacagggggacccaccccctgaggtacggagtacattgcaaggaatactttcccgagctagcctctagccataattctttcaacagactataatcatgcgagtctgtccatgtgcataagaattgacgtggttatttgctaaacgagatgaaaaccgattggcgcctggaagcctcgatacctggatgcctgaaccttatgcccgagacatcaggcataaaccatcacgaaatcagacagcatagtaaagcttaccgcctttctcaccgcttatcactacccttttttcctgatctgccacaatgaagctattcagagatcacctgatctggcaacataaaatatttgtttttattccagattcagattaacaaaagatatgcactacaaaaagcataccccacaaatttcaagaggactcgctttggaagaatagggaatatggtcaattcaaaaatgagtttcgatcattttcaggtttctctgttaggaaattaccttattcggaaacggagaacataacaggtttgccggagtcctagcctagaaagttgtcggagaacacctacaaacaacccaatcccacggtcgtatagcccttccatcgcgttacacaatgtaacttttctatgaacaacccatcgcataaattctttcgatacgagctcaacatcactgttggcgtctgaggaaccagaaaaaccaagtgatcatgttaaggaacatgcataaaatttgcatttcacttgctttcagtgcatgtgcctgcgcagcgactaccggctccgaaccccttgttgccactgctggtgatattgctgctatcccgggatggtacctccaatcatcgaccaaagtattagaagggatggatgtactatccatgccgagaaaagatgtctcctcatggcatcgggttggttctcgtggcacagttatggctgggcttattgagaacgaggtatacaacgagacagaattgttctactcggataagatggaatctatcgctgatccctccacgttcgacgcaccctggctttatcgagaagagttcacactgcacccatccgccggcaaatattttaccctaaagacacatggaatcacatccaaggcagacatatatctgaacggagtgctcgttgcgtcaagtgacgagcagcaaggctcctatggcggccatcagtacgaactgacccatcatgttaaggaaggagctaattgtcttctcgtttgtgcattcccaaccaactatcttcgcgattttgcccaggggtttgtggactggaattcctacccagcagacaatggaaccggcgtttggcgaaatgtggaggtttctcagactggagcggtttcgatgtcgtcgttccgcatcctcactaattttactcaccccaattctgagcctgtgaaggccacctttcggactgatttgagcaattttgaatctagtggtcagcaaataatgatcaacggcaccgtcaaagggccagatggctcggtagctgtgcaaattagcgagacatttgacctgaagtcaaaagagagaaaggcggtgtctatgagtgtgtcaattgtgaaccctgatatttggtggcctgccctttggggtgagcagcctctatacacgatacatgccagcgccatcatccaaaaaccccagaagtcagtgtcagacagttcaattcgccaaaaattcgggattcgccatgtatcatcgagattaaacaagtccaatgataccgagtttgctgtcaatggcgagcccttccaggtcatcggagctggttatgggccggatatcttcttgcgattcgatattcacagggtgcagaatattttcgcctatatgttagatatgggactcaatactgtgcgcttggagggaaaacaggagcacccagaactttatgatctcgcagataagatgggcttgatggtcctggcgggatgggaatgttgtgacaaatgggaagggtggaaggcaagtcttctcatactcttgccgcaacgttagaacactgacaaagacagtataacgacgaggccgatggtgtcaaatggggaaagtccgactacccagttgtgaaggcagcaatgctgcatgaggcagagatgatgcagagccatgcttcgatgcttggctttttagtgggctcagacttctggcccaatatccaagccaccgagatctatttagacgctctcaaagtcatggattggcctaatccaatcattgcatcagccagcaagcgtggttaccccgaagctcttgggccatccggaatgaagatggacggcccatacgattgggtacccccgaattactggtacaacaatgaagaaggagcggcatctggatttggatctgaattgggtcctggagttggtacccctgagattggcagcctgaaaaagttcatgtctggtgccgagctggaaacactttggaaagaaccagatgcagaccaatatcatatgtcccgttatgattcgcaattttacgaccggaagctctacaacaacgctctatttgctcgatacggagagccatctagcctggaggactacatcgtcaaatgtcagatgacagattatgaggccacgcgatcccagtttgaagcttacggaacgcaacaaaatgcgacgcgacctgccacagggattatttattggatgttaaatagcgcctggccgaatctgcattggcagttgtttgattactatctcagccctatggcagcctactttggcaccaaggttggagcgcgtatggaacacgtggcttatgattatgagagccagaatatttggttgattaaccactcgctagaaaacagcggaaatcggcacatcaaggtagatctcattgattcaaatggcgaagaactctccgaggccacagtggagagcaacacaacgcctcattcctcgaaggtggtggcttcgcttaacggaattaaaacaatcaaagatattggcttcctccgtctcacactcagtgataccaaatatgaaggtttccttagtcgcaatgtatactggctctctcctaccacggatgtcttggactggtcaaactctgattggtacaccaccccagttactaagtttgccaaatacactaagctggagacactaaaaccggctactttgaatggttcattacacagcctggagtcaccaacagacgatggtttgactcatgctgaggtcctgctcgaaaaccaatctgcagggccggcagttttcattcgtctgaatgctatcaatgcactcaaaagtgtggaaattgcgccgctttattggtctgataactatgtgactctttggccgaaagaaaatctgcggttaactgttgcatttgaaggagatattcagcatactgtggttgaaattacaggaaggaatgtggagaaagtgactctcaaggtttaagcagtgagttgatatgaatcgtttcagatagcccagagaatgatgtgggtttggattaagaggcaacatcttacttgtaatgaaaaattcttcagcgtcttttaagcaaccatttgattggtagaggataatgtttctattcttgtacattgtttcgcttgccgctccgttgtgtaggactcgggtggtgacttcgccctgatataaaatcttgatggctactggtcgcagtatccgatccaggtccatatttagaatccgggccgttggaccaaaaaaacccagtcaggcgcagatgcgtctcactcgatacgaaaaagggggctgtacctctcacttcgtgtaattgacataatgatcaagcgtctgaatcgattggatgcgtagatggctgagggatccgaatcacacctgaatcacatcttgtggcgacggttaggtagtagattactaggtacataactgacgtccacctgtagttcctgtgtatgctacaggtacttcgtactggttacggaaggactccaccaccctatacggaccaatgacctttcttcggaaggttcgggtctatcttctccactcgtttaaattatcaccagtcgcgaaaatgatacctaggctgaatgtgaatttctaatgtaattttgtttttcattggttaatatttgcaggcctgccgaaagggaaggtctcaactctgtacaacaacatagagaaacgagctataagccaataggaattaagtcgagacgtggccgctgttccctgcacgtgccctccccgtgaggacggtctaggtaggaactgggcctgccaccctctccagtcctttctcagacttgcgatcacatttcgccacctactctctgatacgttcactatcggcacccttctcaaatgactggcattccattggtgcccgatggcccacctgatttcggcgacttcgcgaagaatgaagacggggaggtcgatctcgaagcagttgtagagccttggcataagtacgacatcaaaataacaccggaagtttttgatcccatttgtcttggagaagtgctaaatgagagatatctgattgagcataaactcggctttggcggcggttctactgtctggatggcttatgacattcaggacaagacagatgtggcccttcaagtcatatgtttaggggactggggtgaaaacaaatgccgcatacaagattaaaattgtcagaatgtggaggatacctctcatctagtgatgtatctaaggacttttctcctccctggaaacgaacctagacatagggttctagtataccctttgatgagtccatgcattgattctattttgttgagaaaaatctctatggctagtcgcatgtccgctgctcggcagttactgaaagccttggaacaactacataaagcagaaattgtactctgtggtaagtcagcctatccctcccacgagaacttatgagctctatcatgtgcaaaatatttcaatattccccagaaaaacggcttactgcaacgcagcttctacaggacccgtcattccgagctattatggacagatatggttgttgatcaaatcttcattctatcgcttcttgctttcctagtttcttatgctctaattttatttcttcatcaccagagctgggtcaacatgcttcgattaaacgggtcggcactgggaatctaaatctacggaatgtccctttcttgaaaagcaaacaccttcaagatgggcaaataaaatagaggaaagagcttccacggactccagaagcttctagaactgtgcttgcgagctgacttagaatggaagggaaaagagagtctgttctcatcactaaaaaattcgggaatgtcgacggagatctcatacaataggtaacttccaaggtaagcattgtctatcattcaatgctgcatatctgctgtcaaatcctggcgccaccctaacctaaaattgaaaatcccgtcaatcttgaacctagttagacggatgggtcctattcgcaactttccacatctatacagatcgatgccccaggcaccaaatccatcacatgactcgaccataatctccccttagctggcccacttgtttatccgattctccggcagcaaccccggttacggcccgttaacgccaggctgaacatgagatgggaaagaaaatcgagcttgagataaagcgcgaccgccatgaaaaaatacaagtagtctgggtgggccctgaaaaatgacgttcctatctactccatagacttctcggacatgcagcctgcgcaatcggattcttgtgcaaccggcccgcgtccatcgcccttgtgtgaggttggacatgtgatcaatggagaggaggaccctcacaccctgaatccaaatcattccaaaaaaccagaagttgatcagaaaattcaagcggtcggcgatgaactggtgcctctttactgtgtcctgccaaatggcgagaagactttcgttattatggcgggatcttttgcagcccttttttcacctctctccagcagtatatatctaccggccctcccatctttggctagcgacatgaatgtttctgtctccctgatcaatttgactatcaccacatacttggtaatgtccaacgaggtagataaggagaatatgaagctaattatttctagatattccaaggactcgcaccttctttcattggcagcttttctgataactatggacgccgtccggcatatatcatcgcttttgccatttatcttggagctaatattggcctcgctttgcaagacaacttcacggcactgatgattctgcgctgtatgcagtcctcgggcagcagtggaaccattgcactaggaagcgctgttgtagcggatctctcgacccgcgccgagcgtgggaaatacattggatacgctggaattggacttgcactaggaccgacccttggccccgttatcggtgggctgttggaccatttcctcggatggcgatcgatattttggttcctggttattttgtcggctgtttgcttggtggtgatccttatcgttctccctgagacgtgtcgagctgttgtgggcaatgggtcggtgccgccagcctcgtggaaccgcccactgtggacattgttcgtacgaacatcacgattcgatgacaaccaagggactgccgatcactccaccgtccaccgattgaagaagcgcccaaatccaattacagcgctcttgatagccacacaaaaagagatggggttggttttattgtacggatccttcttatacgcagggtacatggccgttattagcactttgtcgacccagttggcgagtcgatttggattcaactcgattgaaattggattgtgctatcttccgatgggcatcggaagcataagctcccgctgggtagttggccgagtcatggactggaactttcgccgcgaggcacagttgcagggaatgatcattcacaaaaaccgacagcaagatattgaaaagttcaacgtcgaacgagcacgcttggcgatcactcttccactgatctatatggctagcctttgtattttagcttacggttgggtgatgcagtatcgcacttcgctggccggcccccttgtgatgttgttcttcaccggtcttacaaccacaagtgcattcaacaccttgagtactttggttgtagatatcaatcatcaaagcgccgccactgctgcggcagcaaataatctatttcgctgtctattgggtgcgggggccacggctattgcgtcgcctctaatcaaatgcatcggcattggatggacaggtacattcatcgctggtctttgggtgttaggcagtcctgctctatgggttgttttctaccgagggtaccggtggaggagcgagcacaaacaggataaactcaccaatcagacgcacgcttgagcccgaaattcaatctcatgatttgtgtgaatcccgctagagaatgagcgaccggaccagagatgaagccaaccagagccaaccacattgaatatcagatctactctatgctctgcatattatctccgatgtctccaaaccaaaaaagcttgtaaaagcttggcattaggccccaccaccggccttgcactccacaatgaaatgagttgacgacgctagcgccgaggcttacgcatgctcttctataattaaaaatgatagtatggaaataagattgctcagtggtgtccatttttagagaaaatattttctttcattccttgatgtatcagtgactattttcgagcacatcggtctacgctattctctgatctcctatatccctctctggtgaaacttgtatggtttcccatacaccaccttgataagatgcactttctcggggtgtctccctttgaaggggctgtcgctgcactactcctttccggcgtagcacgcgcaatcgatttggatattagcgatgaacgtacgtggtggagttgagattccgcgcctccccggcccatgtcaattaccagagaagttaacttttgatctcataacagaatcgatcaaagatgccgcgagtacctccacttacgctatgatgaaatattattacggcaacgagaccggtcaaattcctggagcctttccagacaaatggtgggaaggagctccactttttatggccctgttagagtactggcattttactggcgacacgacatacaacgaggaactaagtgttggattgcaatggcaatcaggtacggatggggactatatgccaagcaactacagttcttacctggtgagcatcttcagagtctcaaaaggcaacaatctctaatgccgggtatctaccaggggaacgatgatcaaatgttctggggtctagcggctatgacggccgctgagttctcatttccggaccgatcgactgggttctcttggctctctctagctcagggtgtcttcaatacccagatcaaaagatgggatacaacctcttgtggcggtggtctacggtggcagatttggccataccaatctggatatacaatgaaaaattctatctccaatggggggttatttcagttatctgcacgtctagcccgctacaccggagatgcaatctatctgcagtgggctaacaagatctgggaatggtctgtctcatcacctctgctaagcaacacaacatggaacgttgccgattccaccgatgttagtaatgattgtgcgacccaaggaaacgcccaatggacatataactacggcacgtacctgatgggggcggcgtatatgtacaactatgtgagaaatgcccttttcaaattcatgttggctttgttcaagtacgtgtactaacctctactgcctacagacaaacggtactacccaggctcaatggctgacagcagtaaatggcctactgaacgcgacaatcgagaactttttcctcacgggtggggttatcgaagactattactgcgagccttcagaaacctgcaataataacgaggtccttttcaaaggactaacttccacatggttggcattgactgctctccttgttccatcgacatttgacaccattctcgcgaagctccaaacatcggccaaggcagccgctgcatcctgcacgggccacagcaatggcacttgtggtgtccggtggtataagtctacatgggacgggtggatgggaatggaggaagagatcagtgtgacaaaagtcttcacggcaaatctgatcaactttaacaagacttctccggtgacctcgaccactggcggaaacagtaccagcaatccaacggcaggtgaaagtgacagtgatgcttccagtacaacgactacagtgacaaccggtgacagggcgggcgctggcatcctgaccgctgtttttgtggctggatggattggactcatggctttcatgatgcttggtggttgatttttcgagcacgtgtggacatcgtttacttgcttcctcatttgtgcatttggagttttggcaatctggcaacggattgagtcaatagtgttgtatttatatttacgggagtttcttgttatttttttaattgataccagatttatagacccgtcggtgagagcaagatggttgaaccgactggctattgtatataacggtttacttcagctcacacaatccagaaccatattcgctacatatgtgctggataatgtctagcaactcttgggggtccccttccgttctagtgctcacccccctcgaagaacggcgtagagcactattgtcacagcgatgtcctgcagttacaggggttagtcctaattaggacaagtactttttggcattccattttcaagagcaaaaacgtaaggggagttgtattgatgtcgtgcgagagaagcaatgaccacgttttcagcgtcaagtgtttttcgggcaagtttccaagtgcgtcctctgggtcaatatcgaagattgacggaaactggagccctattttcgcaagtaatcgggcctcgtacatagctccgagtctatacgcggtgatttctgtcaattgctgtaccttttcttttgggtagctgactcctttgagaatttgatccagacagttatgaaagccgatattcggaccggcattgtcggcaccgcggttggaggtaaggtactcttgggcgagatattgtagacgtttgagccgccgtccgagctctagccacttcgctacttgccgcgcatgtcaatgggggaacctgacgcagagactgccattttccttgaatgacacaagaggcaaaccgaggcggttcggggtaggtggttggaagagaactgcttcttccctcaggtgaccttgtcctgactcttgacgatagccttgaatgcggcaatggcatcgtccaggtatacgacatctgtttcaactcgaagattcaacaaccttggaaaaagcttctagatgtgcacaagtagcggtcagttattttaggcagtagaggatacctagtgaaacgaacaggaatccgatcagtgagatagtcccaatggtaaggaaatagatagatgggcgcatgccaatgttcgatattttttgagcgatgagagagatatgtagaaggttagattctctacaacgatcgagatctagtcaaatagctaggtgaagcctggcaaaccaggcaacggcatgtgatcggcacgtggccaccacaacaatatctatacgaaaacaatccaagtttataaatcgaaatttcgaccagacaaggtttagtgccgggaagcttaattgtatgatcttgctccttcctcccctcgactcttctctttcttttcctcatcccgccagctaggtgaagcctggcaaaccaggcaacggcatgtgatcggcacgtggccaccacgacagatataaagtgtccggggattcagcatattcaaatccggggtacaaatactctcttcggtattccagccgcgaaagactagagtaaggtacaaagtgtgtaacttcgggaagaccaaatttcccagagctggctgtaccactgcttcaatcttctggctatatattttcacagttgcagctttcacaatgtcggtatacatctggcggcgctctggggagacgtttatcatgacctcgtccaggtgcatcccacttgatatttctatagagccctacaatatacgtatcgcgacctcatggcgacgaactccacgccagccttcggtggccgttgaatctccagtgaactggcctccgccatgcctttgcagaggatccccagaccgggtgggggacgatgaggatttgctacttggccagctgctgctgttgctgtcttatgtcggggactactagccaactgctggagtaacatgaggtggtgaacaaggtcacttgaggcgtgtttcggatctttcggcgcaagtctcccgaaattcagccgggcggatagtggccattgcgacacgtagtcctggttggatgggaatagaagtggtgggggctgcaatggaataagatatgtgggtcaggcgaagttgcaatgattcgatgtcattctaccggaagaggaatggctacggaggcttgcaagtgcaaattaggaaggcggtactgagtattcaggcagccaagggtatatctgattggactacagtgtagtgctgcgatgaaagagagagttgtatttccgaaggggcagaatacccgactattctagttatggaaggttggtgcctgcaccggactgatggtcaggtgatcaccatatccaacaatatctaataagctgctaaacgtacacataccaagtaacttgcgaggcttaggttcttcctatgcgcattttagtcggtcgaactcttctttgcttgaccagaaattcttgtcgtctacctcgacaaactttgttattttcaggattttgtaattcaaaagaacacaagcaaacatgcaatgtcaatataagtgagggatgaaggtcttggcacataaatgacaaggaaagaaagcaacaaagccattgaagaatgccagtcaagagaaacacttgaaaagcaggatatgaagggctggggaggtgactagaatgatccgcacggcagagaaaatggtgttcggctagtagtcgataacaagagcagtcgcatttacttcaattggtcactggaattaagatctacctggtgttcaacagcagagtgaaatgacgacctaacttccattaccgggcagtgttcccatgtacgcgtctcgatttattgcttcactctggatcgaaactattgacatcaattcggtatatgtgactacgtcgatgtaggcccagccaagaataggagctgatctgtttcaccctagaaagtacgaaattgaatatggcttgagccggcacagcaaggtgcccatctccgtcggaaccctgccacccttgtagccttaggttctggggtgctcatgatgcttcatctcgtccgcttttttatcgttcccctctatatcccgtgggtggattttggcgctgcatcatattgatcgaggaagacgctacaaaatatattattcgacagccccgaacggtcagtgcttttactatcggccaccaatctcagcccaataggcaatataatcccaccccctcttagttgctgatcggcaggcagtcttatcttatggcagaaatgtgtaggtcttgtagagcgattgaaccttctcgcatggaatgttaccgcgcgcgcattgctattttcgatacggagtacaatttcctccaacccctcccaggtcttcattttctatttgagcaattaacagtagtgtaacaagtctgattaatctgaaactgaaatcaatcatgtttttttcgtctccccattacacagatcgtctgtttcgttgatcctatatgttgtttacttctataaaattaccactgagctgagtacactctcgcctttagcctgacaattgacattcttatattagtggagtcattagattctatcgaatatagagtcttgattgaataccaataaagagtgacctgtttgttgatctggaaagcaaaacgcctgttccgaactccaccccgacggcttcggcacgggagacacgccaaaccggcttcacgaggcgtgtcggaatcggtccgcaagtagtctatactatggtgtcattgttgattatatttcagcctgaaaataaaaaaagatgaagagttttccttcgctgagacaaacctgataacggctatggtcggttgtcctcggcagtccactccatagcgggtgtcagccacacctccgattatagccgagactgacatgacttctgactggtcacttatttactctgctagagcactgtgactggatagtggatatctaaagcacctcaagccacagcggaaaagtatggatctttcaaaggtgtctttttgccctagttgaggtcattttccgacaatcagggcccattttacaatggatcaaggattaggccgaagacctagaagactaggaaggaaaaatgtgattgatgggccgaccgaaagagggacatatactgcgttgccttcctcggccagaggcttgtatattcccacaccaactctcggtctattccccaaaccttgatatgatagcatacaatggagtgcctcaatcaacacccagacaaatatgagccagatatcgacttccccattgactctcacagccatcgatccgacgacacaattgaggaaatcgaccctctcgagcttacccgtatcaacacatatcgactgcaacagaaaactaccgtaggctctacaagagggcctactccccgtgacaaatggctccctatgggtgccaataaggattacccacctctgctcccagattctgaagactatgtcgtcgagtttgacggagccaatgatcccttacatccatacaattggtctacatctaggcggtatgttcactaccgtccctccctatgtaaggtacagttgctaatacctcgacagaataatgttagtttgcatcctgtgttatggtacattcgccgggtcgtttaccagcgcggtcttctcggctgctatttctggcctgagcaaggagttcaacacatccgccgaagttggctcacttggtgtgacactctatgtccttggattcgcagccgggccaacaatttgggcaccaggatcagagctgatcggtagacgttggccactgtccctcggacttttcggatgcgccatcttcaccatcgcctgtgcagttgccaaagacctacagaccatcatgatctgtcgcttcttcgccggcctgttctcggcgagtcccatttcagtcgttcccgctgtatttgcagatttgttcaataatacacaacgaggtgtcgtcatgtcgattttctgcatggcagtgtttatcgggcccttttcggcaccgtttgtgggtggtttcattgcaatgagctctctgggttggcggtggataatgtacatctctgcaatcatggtgttcctagggtttgtcctagtctttgtgttccttgaggaaacatatgctccagtcatccttgttcgcaaggcagccaccctacgccgacagactcgcaattggggcattcacgcaaagcaagatgaagtggaagtggatttgaaggagcttctgcggaacaattttgcccgacccattgtcatgttggtcaaggaacccatactgcttttggtctcattgtacatctccttcgtctatggcctcatgtatgctcttttgggcgcataccctgttgtcttccaaggcgtctacggaatgagttcgggtgtcggtggacttgcgtttatcggcattatcatcggcgaacttcttggcggcgtttatatcctcatgatacaaagttcatataagacaaagctggcggcaaacggtgataagcctatacccgaatggcgccttccggcggcgattataggagctgtgtcctttgcaggaggaatgttttggtgagtacccttcttgaaatcctcaacaatatttgatgttctaagctaatgcctaataggttcggctggaccggatacacttcatccatccactggatggcccctgtagcttcgggacttctcaccggagcggggatctttttgatcttcttgcagtgtttcaactatatcgttgactgctatccttcgctgtatgtaaccatgtttctcctgtgaaaactagtaactaacacaattgacagggctgcatccactattgccgcgaacacaatcttacgctcagctattggctgctcattcccacttttctcccggcaaatgatggagaacctaggggtgcaatgggcaggcacaatgcttggatgtatcgcagtcgtgatgattcctattcctgttctgttcaaggtatacggtccatggctgcgggagagaagtaaattggcatgctcgccagtttttgatgttgaaaagaaaccttatgatgtctgatatgaattcatgtgaaaagccaatatacccaattttattttgaagaccagatcgaacacagctctagttagttagttaactagttagtcatagtcttagttatttgtcaatccgcaagggttctttcgttcaactataaatgacgtcaccctgccagtcaatccgccgatccatagatcgatcggattgctaggcactccgcagttcgcgagaatcccacaatctagctaacacctgcgcacttctctcctctcaatatctttcagttcacgatggagtaccctaccaataaccaaataattttcgggccagattgggacctcagtcgctggacctcctccgatgaccgcgtccgtggtggatcatctgtgtcaaatctcgatcctaccccggaaggggtgctttttcacggaaacctcgacattgagacactcggcggtgctgggtttgcttcacagcgcacgatcggagacgaacaagtatgggacctgaccggacacgatggtgttgagctacacgttggtccatcggataggaaacgttacactttctccctgacagacgaaataccacagcagaggccagacggccgtgaacaaagtgctcttgtctgggaatatgatttctgcgagagtgaaacagggcgtgaagtgcgtatctcatggaaagatctgaaaccgacgtatcgaggcaagccggtagaagatgctaggccgttggacttgtcgtgtataaaaaggttccggatcatgattcgaaggtgagttttatgtcaactgagggcgaaacatagatgctaattatatagtttctttggggcacaacaaggtgactttagcctgaaaattcagtcgatcggtctgttccgccagagctaccttgatgatcctagtgtcccgaaagattccatgggccacggtgacgacaagacgggaccggaggaaactgaagagaagaaaagctggtttcgaagttgttgcccattgttttaacttcgtggtcatctccgaaatctaaatgatcctcaaagaattgcatcattgaactcttgtgggatgagtggtgtcatgcgaagaacttcattttgtggatgttgaacttccaaactaggaagggtgctcagtcgttgtaatttaactagcgtttatacaccttcgcaccaaattcttccgacaacgaattttgggaggctacttaggtaaaccatgcaagataattccttacaaatgagccttttttcgagagccccggaagggatttggttgtgggaaatgtgggtttccctcatctcccattcgaggctcttgaaaaacatggatctccgtcgtcttctgtattccgatgtgctccaaaattttctcctgactcgaatgacgactatcatttcggttgacttctggctcgatatgagaggcaaacagcgaagcgtctggaacaagacggataagagggattggcttctgtcgaggagccgactctgtgtgcgtgtacgccgaacccttgcgggagcgctgcagtatggctgcgtaggactgtcggagggtaggcaatgacgagcagatgataataacgtacatctaatatcttcatgagctagaattgcttaaacagtacatgagaacttacctcaatcctagattttatcaacttttgtcaacaattcggagaaaatccctgggggtatgacttacgtataccacatagtaatgtcggcccatgaccctatatacgattagtcggtgtactcgtgaaacatgagtcgaggaatacatacaggtaatgtcagaatggacaggtaggttcttgagcaaaacgcatttgaccagcgttgccgccgccgcactaataagtcagcttgagcctcccggggtgtgatgaaaggagtgagatacaaaataccagctcccatgactgagatgatcgcgaccttcatcttaattgcgagctggacgtgccaaaagatataagccgggaaaacggcgagggccagatcgttgaatgcattgaaggctgcctgggatgttccagcaaccaactgaaagttgagactgaagcaggagccatccaccttcggattccagatacgctctgggggtcggcagaatccaatgatgatcacgatagctaacacattccacgctactgacaccgccatcatgatatataagaaccatcggcgcgctgcggatgcagattgtcccataagccggagcaggaaaatggtcacactcatcttaccagttgtagtgctgacaacagagaagttgggtgctatgactgtgtacttgatcgcctgaatttgccgattgccatctggaatatcgctcaaatggcgtcctaatccgtatgaaatggcgacttggaccaatgaggagcataccagagcatttgccagtgacaaagcgataaagaagtcatcccacccagcgcgcctcagagccacacgtgtgtataaccgcagaccgacaacgaccacggcgacaccaccaaaacaccaggaaactgccgtgatactgacaccgggatcgctcatcatctttgtcaactttgctgccggggtcatcaccacccaaaggccttaaaagcggacgggaaacctcgtatagcgaccataatgatcgcaacgcataccccttattcatccatttcatattagcaaaatcctacagagtactttggcgtacaacagggtactactgtgacatcctgatgagtacatccctgtcattaagccgtcttttcacagccaacccagtgaggaaatcccattggcttgaaatctattggcgggccggggaatgcggtccgggacggggtcatcgacctagcgtgctccacacaatcctttctgatgtcaaatgtggtgaacaaggcgttgttgttgtttttattcccatatctgaaatatcacctttattgtacaactctattgtacaaaggtgaccgagatgcacttcacaccctcatagcgttggctccaaatttaactccgtatagaaagaaaaataataagcggcaaacttgtgggtacaacgtccgaaaatcctttccgacttgaaacgatcgtctagacgccgtacagtatggcactacgcttggatacttggggctagaacctcgaatctcatgagccaagcaagcacacccacagcccaatttatccaccgtgtcagttataaacatgattcgcaaaagcacccaaaaggcgggaaaaaacggatcaaagagtccagggatcattgcaaattcgataacctgattttccttttcagctgctattatacacctttgtcaagttacaactcatcctcttatagagatatctctatccataacactgaagatggcaaccgctgtgtcaaacgagtcattcgaccagctgcagcaccaattgaagcagttgctgggagctttccaaagccaacacgaagaggcagatcgcgtggccgccctgaaggcagcacagaatctagtgaatgcactacaaaagccgcaggattcggtctatcatctggcctattctgtaaatattgtatcatgcagggtgatgatgatatttgtgctaactcgggctagcctactcatgccatgtgtgtgcgcattgccatcgacatggatatattcaccacactgacggagcggaatcggccggtgtcgctcgatgaactggcagccgtgagaaatgcgagtccaattctagttggtatgttcttgtctacggctttttctattttgcatgggtgactgacgatgaaccttctgtgtagaacgagtcttgcgtatcttagttggcatcggctatgttggcgaatatgacacgcgcgtctacgttgcgaatacaatgacacgccagctgactgaccgactcagtatttcggtaatcaaatttatatttgatgtcggcatgcctactcttgccaaagtccccgagttccttcgccgacaggactaccgaaacccagagggcgctaccacaggcccactacaatttgccgagaagattgacgagagtctttggacttggttgccgaaacatccggagtatcttgattcttgcaataccttcatggagggtgaccgcggcgcccggcctagttggcttgaatggttcccggtggatgagcgtcttctatgtggcgctcagaatgatgcggagacgcttatggttgatgtcgcaggcggtcgaggtcatgacctcgcagcattcatggcacggtatccgcatgtgcgagggcgcttggtgctcgaagatttgccacatgttttggaagagagcaccgtagatgcagagcgcattgaaaaacaaccgtttgacctttttaagccacagccgattcatggtgggtctcgtactctgatgcacgatttggacaattattaacgtgagttccaggcgcccgtatttattatatgaaatttattctccacgactggtctgatgaggagaatcatatcattcttactcagctggctggagcaatgaagcagggttactcaaaattgatcatcgaagagtttgtgctggctgatcgtgacggtgttatgttaccggcgatgtgggattgggaaatgatgattttctgtaatagcatggagcgctcccagtctcattggactcgcttgcttggagcagctggtttccaggttatcaagttctgggcacctcctggcgatgggcaaggcatcatcgaagccgaactcaaatagtttgttaggagctatgaggaagcgagtttgaactatcctgatctttttatttagtttgacaagtcacatgtgatattcgctcgatcgtgtagaaggtaagatgacttatcaagctctgatttccaccctaacatcttgtagatctcaaactatatttttcgtcgctcttgcgcgttgaagaagctattccgataacgcatttccaaccgtacaaaggcagtaaaatgcagacatctttcgacatcaatattagtaatagtgattaatttccaacctcattcgcacaagggcaaattctacggtcaggcagctctaaaactgagagaaataaagggtctatacagtcggtataacctcaacgcttggatatggccaaaattaccgttgtggggtgggaatagaatcaattccgcggtttaactacggagtacagaaaagtatcagcactctacttctccgtaatcgtgccaggcgcccaaaacacataccgtgtgttggtacgccccagtcaacgataattttcactcaacgataaaattgccaaaccaggtgccttttgtatggtatactaatacaaatagtacttatcatacaaaatcttaatatccattttctcgatcctctactaaggcaggggaataataggtctatacatattaattaaaagggctttagtttatttgacatctattcgaaatatcaggtagacttaaaattataagatattcaagtttttacatatacacacacatatgttatgtggtgctttttaaatatatttgtcatacttctatagttattctgtaatttagtaccagctacctgtaagcgaccgctcggggtggtgacgcatacgggttatagtttgctgagcgtagacgaatcaaagtctgtcctaatgtgacctactacatatagggggtagcctagtttatatactctatataagcctttaggcattcgaacctaccccccagcctacctggttggggcgcaccaacacacggacggtatgtgttttggcgcctggcacgattactcatggcattaggcggtgtagaaggcggtctaaaatccgtgggagctggacagttcacccaaccggtggagatcttacgtgatttaaggccacgggttgggtgaaaaaacgacgcaggttgggtgaactgtcgtctcgctcgtccgctcatcccaattaggctacgaaaccataaaaatcaggcactagactgttgatagtaactagttaactatgtaccttcgtagatatatattactcaaatttgggattcggctctgtgacataacaatgaactaaagatcttccttcaattattcatgcactcactgctagtattgctactccaggcctcatgaatccaagtagggtttgcatgaattttaaaccagtgcaatttgtactctattgtcaaattctaacaaatacatgatgatgcttttaacaaatcgaccaagaacaccccaaccccagaagcaatgtgaacgctcaaaagaaatctgacatctcaaaccgaaggtgtagtctgttcattggtgtgtgcttgcggtctgtaatctctagtagacgccgtagtccgagatgttgtggaggtggtgtggctgtgatagtttgaaagtgacggtgcgcttcgcgctggaaagtattccgtctccggctggctggtgaacatcatggaggagcggtcaacctcaacgttggtggtggattttcctttcgtggtcacaaggggtaacttcgagtacgacggattggaatgcaacagcttccgagccgcgattcgtcgtgtctttgctctctggcgcatacaataaaagagactgacgccgctaaacagcgagatcatacagacgccaaatataattcctgttatgttacccctgcggttccattctgtattgttagtatgatgggaatcttgcgcctagtgggcttgaagactcactgtccagtgccgctgcggcactactcttcgcagttgaagttgtagtacttgtcgtagtcgaagcgctgctagttgtcgttgatgcacttgtggttgatgaggtgctgctagttgtagccgtggagctgctggtacttgaactggtactcgaactggtagtcgaactggtagtcgagctggcagatgtggttgtagatgttgtagatgtagatgtctcggatgtagaggtagatgtctcggatgtggaacttgcggtcgtagatgtcgtagatgttgttgaagtagatgttgtagatgtggttgtgtcggttgtggtatctgtggatgtagtagagtcggttgtcgcagtggtgtctctggcccgaagaatctcgccatatctacgtttcccgtagagatgggctacctcactcggctctgggtcttcccataaatcaacggatgtcgctgtggctgagatccatggtgtggtttcagaggcataggggtgaccgagcacccgagagcacagcactgtgcaaagtgcaaataatagaaaatgcatggttcttcaatcgagaaaacagtacggagtagacaaagaaagaatgaatgaacatcaccgaaaaagaatcggaataatttaagacttgctttggcatttgatagtcttgaaaaaaaggccacgcggcataactagacacacgcgtaagacaatttccctataaatctagtctccaattatggttgctgccatggcttagtgtttatttttgtaccaagcgttgtggaatcagccagtggacagccggtgcaggaggcttggttgaactgcacacgcatatgccgcgcggcaccccacaaggctgattttatggttcaatctgtctctattttttggtcagtaatgttctactcaaatttcaatgttttcaagtgaacagactcaacagagtacaggatcctatcttataagtagtatagaaaaagccgtcccccagtcggctggtacatacgatctagttagttacttactgccaagagacactaaagtattgcgccattgagagataaggagattctggaaaagaaaaattgcctgatcatgatcattctcgttgaaattcaagacgtagagatttatctaaatatcgaatgttttccaatattgaagtcaaaaatatcagagaacttccgatttacgcctgagatatcaggcatcaaaaggtaaaaaaaggttaactaaggtagaaagatccaccatcaatattgacgccaagcgttttggtaggagattgtatttgcacgctcgctacggattaatgtcgtatatcttgaggatatccctggagcacaatgacgcagttggatgctccccaaatacttcccgagcgccacccgattccgcatacgcttaatgcctgtttaggaagtggggaatgaagccacatgtctatttccactaacttcagatcatccaagtaattaatcccaatatccccgggatcgtttttagtgtccgtcagcggcaatgacgcagttgagcgttgtacacgcttcccttatgaaaggaattactatatgtaggtggcattgtgacaagaccatgtggctttctagttacagttctttacggaatgtaacccccgcaaattttataatctgctgatagtttctccatatgaaaatataatgtagtatcattatctaaaatacttcccgttggagccatcaaaccccaatgagaagacccttgtgggttacatgggtagtcagctgctgcatggaatgtaattgctaacagtttctccacaaaggacatgtttgtatgtatgtagacagaatcataaatcttttcttccgttcagattgtatagtttagcaatttgactttgagttattgtctgtatacaaacatcgtcaagtgtttgatctgtaggttaaattcgggagattactgatataaggccgacgaggtaaatcatatttcactacatttgctgagctattataaaaaacctctagtccaaaatgcgtgaaaaaccacgggttacagctgctttagagtcagaaaatcaatttaaaatcaatggaaatgaggctgtgtattattatggatggcgggaatgtagaacttgaactagcacagtatagagggcaactgagtctctacttgcctgaaaaaaaaaaacaatgttagatatatacacgccaaggtatcattgatgttgtcgtccttcgaaatgatgtccctattttacttctataccttcgtacgcatgtatatataaaataaatgagacactactaccctgcaacatccggaggcccgtaaacaaaaaagaaacccgcatcatcagcaaatttttgatcgtgtggacattgacgcaccaactctacggactttccgccccaaagctccgtaacaaccacatggttccttgtaaatatggaactgattggattcggagagatagggaacaaacatcacactcattgccctaatgatgaaacttcgtaggtcagctgcgagaagtctccgagtgatttggtgaatcaatgatatatttaatgatctgacccataagaaaaatgaaagaagatgccagaaacaaaagagcagctcaaggtaaactaagagaatttaaaaacaatgacgaagatacggttcattctgggtgtgattactttactatctactctagttcatgctgcgtctacgggaaattatcacatacgtcgtgtcaaaagacagtcgacagaccgactcgtatttgctcactttatggtaaatattccgtcgagtgccttatttgtgttggatatgtactgatcatcgaaagattggaattgtgagcaacagaaagagcgcgtcagactttgacgatgacatgaagcgggccaagtctctgggaattgacgcattcgctctgaacattggcgtggatccctacactgaccaacaacttcaactggcatacgaatcggctgccaacaatgacatgaaagtcttcctatcattcgatttcaactggtggcacattgaacaggctactgaaattggccagaagattgcccagtatggtaccaaacctgcgcaacttgtcgtcgatgacaaggtgtttgtttcatcattcgccggcgatggactggatgttgcagctttgcgagccgcagtgggaagatcgatatttttcgcacccaatttccatccatctactggaacagacatctcgccagttgacgggctattgaactggatggcctggccaaacaacggaaataacaaagccccaactccaggtcacaatatttctgtggccgacggagatgatgaatacgtcaacgcccttggcggaaaagcttatattgcccgtcagtttcatttccattgaatttaaatcgattttctgactcttaagcagctgtatccccgtggtttttcacgcatttcggaccagaggtttcttatagcaagaattggaacttcccatctgatctcctatggtttaacagatggaatgagattcttgcgttgaaaccgagatttatcgagattgtgacatggaatgactatggagagtctcattacattggtcctttgaactcaacacatactgacgacggggcctcaaaatgggtcaatgacatgtaagaatatcagtccctcatccaaaggaatccctatttcaactcgaccaactaacagataactacaggcctcatgacgggtggcttgacatttcgaaaccatatatcgctgcgttcaaagcaggccagtcgtcccccgacaaccatatatcatctgatgagctggtgtactggtatcgacctgcaccacgtggggtggactgcgactctacggatacttgcatggtaccagcaaacaatgggagtggaaactatttcatgggtcgtccggatggctgggagtccatggcggattctgtcttcgttgtttcgttgcttacatccccagccacggtgcaggtcaatagcggcgggactgtctataattacgacgcaccagcaggtgcaagtgcaaaggaggtgccgatgggagttggctcgcaaagctttacggtaattcgtgatgggcaaactattctgtcagggaccagtttgaaggagattatcaatgactgcgtgtgtggtctgtataacttcaacgcctatggtatgtgaaggtattaccactggttattaccccatttctgactttgatgatagtcggaacccttcctgcgggatttgatgatcccctccagcaagatggactctcggcctttacacagggcttgcgtatccatacatgtcaaccgactccctcattaggcacagtacccccagctcccccatcttcaagtacgagcagcaggttgccgagttctcctccaacaacacccccgagtacaacacccccgagtacaacgccgcctgcaagtacaacgaccccccctgaacaatgctctactaccacatcgactgttgtgatcactgttacagtcactcagactctcagtccatcaccttctactcctccaaacggtggcagtggagataaggtctgcattgcgggaacaggatcggataactacgtaggattatgttccttttgttgcacctatggttattgtccagctgggccctgcacttgtacggagtatggggatccagtcccgtctccaccatcaactggagctcgtggggcacctcttgtaggcgaagacgattcgtacctcggtctttgcagttttgcatgcgatcatggctattgtccccccacagcctgcagggtagtttgagcgcgagtctcaaaaggggtgagatagttctcttaacatattatcgaattgtgatttaaaatcataacatgacttgtcgctggccgatttaggttccaatgtattcaaggctatgtcagatatgtttactgtgtgccggaagaatatattccaactgtatgaattcatgaaagtcctcaactaccaactgtaacaataacatcaagctttattaaactagattttgtagcaatcccttttgtggagattgaaaggcaaggaacctcagacaaatggagaatcaagacaaacactatagcattgccagcaaagcttgaactgcagcaaaggctagtacgagaccagcaggtcctgaccttccagccgcactcgccgccggagttgtggcaatggtggtagcagcagcagcgggggatggaacgccagtggtagtaccatttagagtggaatttgctgtcgctgccaccgcgctagcagtggaagttatggtaaccgccaacagagttatctggtcccaagcgacggttgaggtgctggtgccgggcgtaccagctgtccctgtaacagtgtcggtacaagtataagccccggtggggagatcggtcacatcgcagacaacgtggttatatctgttgaatcaattagcaatctattatggcttgcagcaatagttgagagttgagtaaacgcacaggtcggttgcggaacttatcaagtattcgacgctcgttggagctgcggtaaaaaaaagcccagggcccataccgcattctgagctattggtgccattcggacaattgatactgtaggtagttgttgctgaatgctatttgaaatttagttcaatgttcgagaatcattcccattgatacgaaccgcgcccaaaacttcacccaccaaggattgggagtgagcgtttggaataaacaaagaaaccacagagtcgttggcagcaagtcccagcgttgcaaatgttaggagagcttgcaaaagcattttgtcctagtctttctctgtatatggtgattgagtacaagacaagaggagattttgccgggcactggatcaattaggaaagtcagcattagaagaataaattatagttgtgatgtaaacgttatcatcatcattttctaaggctgtcgtgttgttacggaaacttcttgcgtgttgtatatcgaaatgatgaaactgccatgtcatacggatcaaaagccggccatcatcttacattttaatattacaatttggcgctcaaagcccaaaagagagagaagaggtgataatgagaagtgataatatatcctagtgattggaatatttatcttactttgtgtccacgctggtgaatgcgccatattcttcataacaggggcatccatatgatatcgtcattattaccattcacgaatagagccatctggtccatagaactccttgggctgccaaggctctgtctccttgctgattttccgtaccaggtcttcgtcaatatcaattcccaagcccggtttagaaggagcagccacgtatccctcagtaatatcgaagactgtcttgtccaccaagtagctgttcagatcaatatctccagcttcaacattgtagtgcatacccagcgacatctcctggatgacaaaattaggtatcgacacggccacttggagacaggctgccaaggcgataggacctagaggacaatgaggcgcgatagcaacatcgtaggcttcggccatattggctatacgcatggtttcggagatacctcctgcgtgggcaacatcaggctgtaggatatctaccgacgaatcctccaagaatctcttaacttcccacctggagtataagcgctcgccgaatgcgataggaattgtagtatagtcggaaagttgctttatcgcttcggggtgttcggacagcagaggctcttcgatgaatagagggtggtaaggttccagtgccttagccagctgcttagccataggtttgtgcaagcgaccgtggaagtccacaccggcatcaagacccagagccttcacttgtttcactcgttccacacaggactgtaagacggcgggcgagtctagccagttgacatcttcggtggcgttcatcttgatgcacttgaggccttgggcgattcgttcttttctattgacagaggttgttagaatttcagtctcctttgctctcctttcgtttcttgcaactcacgctgcagccaccacatcgcttggtcggtcaccgccaatccaggcataaacctgtaccttctggcgcaccttcccgcccaggagctcgtggactgggacacccagcttccgacccttcagatcccacaaagcgatgtcaatccctgatagtgctgacatgaataccggtccaccccggtagaacccgagccgccatactgtctgccaaatgtgctgaatgtcactgtcaaaggtggttagagcttttatctgtgaagaaccatgattcaagcatactccgcttcatatcccacaatgcgagtgataatttcatcgagtgctccttcgaccgcaagagaatgtccctccagtgtgccctctccccaaccgaagcgcccctcatcatcggtgactttgacaaacagccagcgaggcttgacacggaagtgctcgatggacttgatcttggccatggtgagttactggatgaattcctcgtgtattgaatgattccggagtaacaatttgagtgcgactgaattatattcgctgttcacgacacaaccccacaccatgaacgcatcccacgcgggggcctcgggagaagtccgaactgattgccgtggtatcagttctatgaggggattgatggttgaccgttaatctttatagttaaatcagccaagtcaactcagcccatatgttccttagagatgtcgaatataggttgggagcgtgagttgcctcgtcagaatgagatattgaaagcattcactgaaacgcaagctaacttcagggctacatcgagctataaattagatcactgtctgagcagctcgttcccattcaatgacatgccaacactatatcatctcccctggttatccatgaagtccacccccacgcggccattctccgatgcggggaacctcgaaagtacggtttttgccaggcagaaaattagtaagaaattaataatccacgctcatggccgcggggaataggtgagaccaaggcggtaggaaaggcgttaaagacaatatgcgcgatggcatcgcaaacgtagaaaagtctcaggaaaagacaattcttttcttttggtcgttacaaaatgtcggatcgaattgatgtcctcgtctacggcttgggagcgtgagttcaacctcttcataaaaaagatgatatactaacttctataggattggctccttctatgccttcatcctgagtcgctccgaccgcgtgcgactaacggtcgtggcacgttcaaattatgaagctgtccaggcaaatgtgagtgcttactagacatgaggctattctagtattaatatctgggccccaatagggaatcaatatcaatagcgagaatcatggccagcataactttcgtccacaccgaggtatgcgagatatgcacgattaaaatcaagctattttgctgacaagccaacaagtggtaaaatcaattgcagagatttcaccagtcgactatgtcgtatgcgctcacaaagcaatcaatcaagatgatgtggtagctcagctacagccagccatcgacagcaggactaccattgtcatcatccagaatggcgttggtaacgaggaacccttccgaaagcacttccccaacaacacgatcataacctgtgtggtgagttctctttacatcataatcccacagtctcatctgacttctgcagacgtgggtaggagtcatacaggcaagtcctggaatcgtcacgcacggcaaatccgaggctacgcagatgggcttatttcccaatcccaaggtcgaaagccaagtcgagcaacaacgccttggaacatttgccgatctcctccgccgtggcaagactcaggtccaggttgctgaggatatacagacctatcgatggcggaaggtggtttggaacgtagcatggaactcgttgactgctctcactatggtggatacacaaacttggttgaagtcatcagaagatgcaacgccttttacacgccagttgatgcaggaggtcatcaacatcgcccgtggatgtggtgtacccctcaaggatgatctggttgaccagcttatggacaaaatcaattccttgcccggcattggaagcagcatgcagacggattgcaaaaatggacggccaatggagatcgacgttatcttgggcttcccagtgcggaaatctcgagaacttggtatacaagccccctttttggagaccctctacgttcttcttcgggcggttgatggtcgactcagggccgcgcagtagatcatgatacttgatttggcttcacctgatgatgtagcgctcgctatagagttcatacacctgaagattgtagaaagttatttgaattgtccgtgatagtcgaatatacttgagacttaagaccaagactccacttcccaacggaggatgccatctatagcatactacacacttctagtctcgactgacgacgtcgattatataaatagggctcatgcaagatattcgacatatcgcgatctccggcaacaccaaaaacaaagcccaaggagggcaatatgcgaaagaaaagtcgctccagataatataaacacggctccggatattctacagtgtaccgatgcgacgtcccgctcatgacgtcgaaaatgcaagtaaacagagcgagggccagcctgcttgttcgtccgtctatttcgggaggttcatgaaagtcagaaacacccatgcgcaaatgagtatataccctaaaaatattatatagcgtattgaaatcggaaaaaaagtcgtagcacatatgacaggatcatcagggcggagtaggagaggggggacttcgaatctcctgtagctgaattgaggtggtcttgtccacctccacttctggggcgacgtccggcggatcgggaggtttgatattctctggttcctggtcaacggcgaacctccagcggttatcggcacccaagaacatgcggaaagcgtagcgtttgttcagggatacgagatgagcatgacgtttggcactgctccaggtatgtgtatcggtaaaatcatgaagcatttggctgtgcgaaatccagggaatgatggctccaatggagcgcggcattcggggtgctcggaaccggccatgtcgtgttccgaacactaaaagcacgacgatcgtgtcgaaggcaataatggctagcgcgatggcaagtgacggacccgacggaaccatgctccaggtaacgcgggtaatggtggaatttgtggctgggaccgggtgggcgaggggttcgagataaatatcacgccaaatcgagaagtaggtgctatagacccattggtatacagtgcgagtcatggatgtcagaagcgcggggttgagggcgctaaagttggggtcttcgcgttcgtagagacgggcaacaaggaatcctgcccaatcataggaagagatattgtatgtcccattctgcatgctagtattgcctacaaagctgctagggatagcagcaaagactttgttgaactgaccgagacccacggtggcattgtcgtacatagttccttgggtgacggatgttgtgggaacaggttcgtgccaactgatctgtcccttctggtcgaaagcaatagaatagttttgcaacttcgcctggggttcacagtgcaaagcaattgtgttggcatccgtgattggcgtgtccggcaaataatcccaacggccgacaaccagaacggtcgacgtctggcagatgtccgagtcctcgacatcatccggggacaggaaatggatagatagtgagattccttcctctttgcttttcaggggtggcatgcgtgccgtgcattccacggaggaattgccaaatagttcatagcgccactgttgatggccattggctttatcatagacaagagcatcggatgaaaggggctcacacttgagctcagctccaactccaagcgttgaggcaccgtaagtcacatccggattgcgattggacacgtgtattgggacaaaagattgatttgggctagtccaagagagcatagggactccactgctgatactagtctgaatcaaatcatactcagtgaattccacagcgaagtcggtccgccaaaatattgactggctgtagttcattgacaaatcgctggtttccaatgttgaggttgtcaattgttgagtgaagagcgcacccgcaacgacagtcaaagccatgttgacgaggcacgcaattgatacgagaacgagcaaaggctgccggttgcgtactgccttgaagaaaatggcgagcggactttgggacgaatagttcaatgacaacgacgtccttgccgaggcgttgcctcgttgcaggtggacccaaggctccaggacgctgaggttccggtgaatagaggtacatagagcccccacggacgatgcaacgacggaaggtaggaaggaaaggacaacctggaatgcacttgaatcggattgggtcaaatggcggaagcggccgtttcgaagtaaagatgagaccactaatccgatgagaataatgactccagctagcgccaagaattcaataagaaagaaaggaattacgagaaagtgaggcatccgatcaacacgggtttgtaggttctctccaagctggacgggggagcctaatgatacagtcagttataattctcgacgatgaatgtgattcgaagggtcggggtgatacaaaccgtcttcggtgagaatatccagcctgttgccagaaggtcccggtcgccagtaacatcttgcattcttgaagatacgacgaagttgccgagtagagaattgatgaaattccgccactggctgtgcgaggatgttggatgggtggaaaacattaacggcaatactacacatggcaccaatagaccctgggtcgctttggagaaatagttcacgagaactatacatgtaaaggaggtacaccgtggtcaaagtggctatggcaagaatgaactcagaccaaagggcggcaaaggtaacgacagcgattgcgacttggttcgacaggcgctcggcagcgaggatgctgggtgcactatccggatcaaacaggcgaccgagtgtgagcacgaacgtctgcttaacatcacgcgcaatcttggattcaaattcggtctcggtcatgacggtcgatgtgtcgagcaccagcacaggctggatgtctcctaactcctggctgatgataggcagttcagtcactgtgcgagcgcccgtggtagcattttcacgaatgaagagcatgtcactagtgaatggagcgcgttgagagagcagggcttggaagtgttcaatgttgaactgagcttttgtcagcgcgcgggtggtggctcgatcgactttgatagatatgatggagctgttggagtgcatggtcacgcgagcctccgctttgtgatagaggatatcacaggcaaatgccataccagacgtggggaaattggtcgaatctgggctggtcgtattgactccgatgagcataccatacagatcatacggaccgcagccatgttctgtgaaggcctggattcggtccggaaatgcttctttggcagcagcactgatcatcggctcccaatagcgtacttgcagataatcggtggtagggaagaagacactctcgtattgaaaatcaacggtacactttgaggcgccttcgtgtgcattattgaaatcaataccagtggcattccatgaaattgttggatatgccgactcgggatcattgatagcaacggtgagcttgtccccaacagaaacattctcgcaggaaaggtgcgcccaatacagcgtctgatcaagagtccacattatgctctcgtcttgctggctgtcgggtatctccacaggcgccacggcatacttgggtgatcgggaccggcccaatagctcatgtgagagaaccacgtcgccattggcttgcgttgagatccagttcgcttgtgtgtccaaatccacaaggttgggccagctttttacggtcctgtcgtcgatcaccgtcacctcgcgtagctcaaataccgtactctgtagagcgggaagaatcattcggattgagagcgtgacaaatgaaacccagagcacaatccaatggcggcggattgcagcattaatcggagtcataaaactttggccgaagttgtagttgatgaagaggacggtcgccggcgctccctcggggcgggacaactggaagtatggttctaggcggaggacatcaaaatcggtcacggtccataccaagacgagcacgagggagatgattatagggaggtaattgtaggcaaaagattgtatggcgttgacgtcttccgtgtagctgaaaaagaccaagcccccttcgcgatcgctatactgccgcaacccttccaggcccagcagcatcgttaacatcaaacatataagagaggacaggtagggcgggcgcagagccattgggcgccaacctcgatgttgagggcggactcggggcaaaagaaacggggcaaaacgacctagttcgcatctcgattagcatactcgtatactccatgagggttcaatgaagaatgcgaaaggaaaggggtgtcaggcgaaagcagccactcaccaatctgtgatgcccagcgccctaccccatcactaccggacatgctggatgaggtcccgaaggcggacaatgtacttgatacaaccgaagggcattgccaaatcaactttcaaccattcaacaaacctctggtgccagcacaacaggccatgattccacaaagggggtgatagaccaaggttcaacaagacaaagggaaaagagagcactcggccgtaaaaccagatgaaaacaatgaccaacccagaaccaacaaaatgagatggatctcagaaacggatctcagaaatgacgaaggagaagaggagaatcgattttgttgtggctgtgctgtctgtgcctgtacccacacgtggggcggagttatcctcaacaggcacgatcgactatacaatcattccgtacctatattgtaggtgcaaatcgaaatctcttttgactcaagaatccaactaatctggaattctcctatgtgaaaatgaagtttagtgagatttcaattgatcttctagtaggacattggttgatcaagcagtatatcataccttaaaataacctaattcaaacgagcgattaacaagcaatctctagaaaattctatggtttcatgagtgaataacggttaagttctactatttatataactggagataattatgaaaataaatcaccagcaaccaaactagaagacgacgagataaggatatactaccaagtagcatagctgggaggacaagcaacgccggaagagaaaaagcgtgctgggattcttagacgagctagttccaaggagagcagtagcagtgagggtatgggggtcaagaagtaaagtaagggtctgtatagtgaaaagctcatagataactatcggcttaatcaattatatatattcaagcatcgggtgacaaacttgattgatcacggttgaattcatcctaagattgtaagtattgcatcgccatatgtcaaattagacccggctatcgaagtttgggcacgcacgtggagcttctaaggttcagccatatgggaattccctatagatatagggaactgttgtagtttggcatatgaagtccagcggttcaacaggtaggagacttgggcgatccaagtgtggttgggaattgggatctttgtatccgtggtctagatagttctggttaagaatgatggcctggctcatcgccacttgaattttccgattatcgggcctgccgagatcggtccactggttcaccatcggcatgcctaatttacgggcaccgaaacctctccacgcttgacttcaatatgcatatccgagaactccgtacatggacagccaatcataccattgattctgattggccattctttatccttatcatgtggatatagtgaatatgctacctagtaatctatcgtggaactacatacggaccatagagtcatatgttgtagtagtagcatatcagtctcaaatgcctagacgaaagtgggtgttttgttgtatcagctgtatgtgacatcttgatctgtatttgggcatggcttgcttgatggcctatcaaactaatgatcatgaacccggagtgaatcacaatactccggccggatatgcggccacttctcctaacgacgcaagattttgagaatctgattatctagctcaacgttacaatggacgttatcatatgtaagataacactccgatatctttcaaaaagtctcttgaaatctattttcttcgctgcgtcatacatagctacgaagaagttgaacactagatttcccttgagtctagttacccttataaccattgcaccaactcgactttgttcaaggcgacacagacgaatatcaattccaaagtcattaatttcgagggttaaggataatccggaattgcctccgaatataacaggaaaaacagagaatgcttcacttctcgtctctctgcatttctcaaaagtatctgtacaatgctgtaacccggtatagctacatccctcgtttgtcttgtttctttcgagctcccttgaggaaatctaatcaagcccattgaatatccgagtgccttctttatatatagaaaagtaaccgatgccaaggagagaatggttggaagctggatcgtcagacgtttgttgacgttggggaaatggcccgatgccttggtcttggcagtcggagctttccccgagagctcgcactcgcttccctcttgctactccccacctatttccaactcctctcctctcctcagcaatgggtattttcagcaaattggtcaagaccaccgtcgcgggcagtattgcctcggtcggtgtcttctggggtgccacgcgcaatgacgttttcgaagccatggacagctccgatcccattttccaatcagccttttacaagaagttcaacccaaacaacaaccctacccttcatgatgtctgcgttcgtcgcattcccctagacaagattcaaccctcactggtcgaggagaagggcaagttggtggaagcgttctgtgccggtgtctggggtggcctgggtaagtcctaccctggggaaacgagccttgtcgcgatgtaacatgctttttaacacgttgggtttctctccaggatacattccccagcgagccatccttgaacgaaagtaccgcggccccgagactgccggtcatctctgggaccgatcggaccttctcaaaaacaaatacgaagtaggaaccatcgtcaccgaccactttgaggtcgtcgagaagaccgaggaccgtattgtcgttcgctgtggtgactctccacgtaaccgtgacgtccgtccctccgatggcctcttcgaaatcgccgctaagatcaagccgaatgaaggcgttgctgagttcagtctgaagagctgtttctaccaggggctcggcaaggcggaaggtgcgcctatggatgacaaagtggcttgggcacaccgtcagtatactaagttattgctggaaaccgccgtgttgaagaagtgcatccggtagaagggaaggacctcgcatacgaaagaatcctaaaccttcggttgggccatgtcgtgtatatattcctaatcaggtatccataatcatggtctattagcattcaacttcaactcaatcgggacaagcataaaactttcaatgtttatgtttttctattcttctactttacatctatatttattcgaccacaaagattctgcactttcccctatctaaaggctgacatacaaaaaaatcaagacttcaccacctcggcctcgggctccttcatctctgggaagtccttctcctcgacggcgattgtttctacatcactggtcagagtgatagccaggacggttgggatagcgataaccaatgagcccatgcaaaggccccagtccatagcgaattgggtcatcgcgggtttcttcatggcattgatacgccacgccattgcaccaccaacactctggaaggtcttgtacgctccgaccagaacggccgatgtagcgggggaattggactgagcgcccacgatccagtagcagaatgattgccacagcgcatcataagcaccgtagaagatgtagaggaacatcgggcccactgagatgctaccctgtgtgtaatcgatatcctgcttcaggcccttatccagacgggcagtagaccacaactggaacttataaccaccaccccagatgcccattccagtgacgaacaagaatacccaggcgatgcgagcgcgcatgggtcggttcagacccgggaagtcgagaatgagacccatgacgagaccacccagcatctgcgcaatccaataaagcgcgccgttgagcgaacgcgtccggatattaaagttcataccattcacagcattctgctggtaggagtagaaaacattgacggagaagaagagcggcaggatacacaacacccgccagttgcagatagtcaggatggcatggcgaagaatgtggcggaagttcttttcgctctccggtgtgatctgcaattgggcacctttgacatacgatggcgggcaaatgaatactcccagggcccatccgaaggccatgatggtaagtaaggcgatgtacgttgagtcgctaacagtgccgctcgtcgacttgaaattgatgccgaaactagcgagagatccaacgccaccaccgaggttgaagataatccagaagactgcgattgcgcgacccttgtgtgactcgggcacataggtagtcatgatggcgccctgtgccacccacaagaatgatgcgccaacaccgagaagggcaccggaggcaatcacaaatgcaccattgttggttgctgttggaagtatacgttagctgtgtatacaacggcagtgcggattggaagctgaacatacagttgaaacacagaagactgccggaatacaatgcataagtccatcctccgagcaagagacaaactctgggtcccacacgatcgaagatagggccgacaacgaagagtgcagttccggcagtacaggccaggagagctacagtcgcatttgcagcgacggtctggttaacttgaccggaaccaccaagaccgctgagagcattgtacatctaatagcattgttagttcttggaacttgactaccagtccttgccaaactcactcccgggcagcagaagcagatgaaactgatcaagctgatctggaaccaagaatcggtccagatcttgaacaaggtagagcgattctcattgtgggtgccggcgacacgcccttcttcgactgattggttcgacatcttgtgcgtatgaaacaaaaagtccggggagggaacgacggggatcttatgctaaagacttatagtactagtcccgacattcccctatatcggacaattagcgcttatcgagtctggggccccacgcgatacggcagttaggttgcacgcgatacgctcatggttgcacgcgagaacggcgtatgatatgcgtatcttcagcgtatagtatgtggatatctgctgtgaagtagtagcaaaagtggagcaagactgtggcctttagattgaattgcattatcgggccttatcacacgacttcttctttctcggccgacgaatcctatggtagataaactccactacgccgccacatcggttcatgccgattcctttctgggaaaagtctggagaagttgaggtctccaccccggtcgcttgctaaccggtccaatcctgcgagggcaagatcccgtcgttgtaactctaccttgtaacggctcccattagatcgggccactaactgtctttttggtaccagggacttctcgctttacgtacagagaatctgtcaacttcccatcttggtatagacctcgtggaatggagcggtattaggcacgtggctgacatcgcgctatctccgaaatggatcctgttcgtctccccaatcgtctaaaagccccccttatcgccctttttccgtgtagtttgagctctgactcgtgattcgtgaaaaaaattatattaatattctgacaagcaaaggcgttaagcttgtcatctcccaagcaatcatcccatccttggaagaacacccggcataatggatctcggaagtctatctcaactccaaacggagggggtcaatccccgaaccgtgcatattgaccgcatgtcgacccttgacatgtgcactgtgatcaatgccgacgatcaaaaagtccctgagagtgttgttccttgcttgcccgttatcgcgggagctattgacgcactgacgccgcgagttcgacaaggcggtcgggtgatttatgtcggcgctggcactagcggaaggtgagtcacgtgacagtggtccggtagtcaataaacaaaaagattaaaccgattctaggcttgggatcttggatgcatcggaaatccccccgaccttcgctgcccctcgcggacagttcgtcggcctgattgctggtggagatgccgctatccgagaggcccaggagggagccgaggatgatgagaaagccggtgaggatgagatgaaatccctcaacctgaaccccgagcttgatagtatcattggaattgcaagctcaggccgcacaccttatgtcctgggctgtcttgctttcgctaagcgtctcggttgtgtgaccattgcggttgtttgtacagttccttctgcgatcggcctttccggaaatgtggacttcctcatttcacccgtgtctgggcctgaagtggtcactggtagcacccgtctcaaggccggcactgctactaagctggtgttgaatatgctaagtactggtaccatgattcgcacaggaaagacttatggaaacatggtatgtgatttgcccccgaccgttgtactctggctaaatgttgatattcaagatggttgatctcgtggcctcgaatttgaaactcgagcaaagatcccgcaatattctacggaggttgagtggaaagtgtcagtccttatccgacgctgaattggacgctctccttgcgagatgcaatgccagtgtcaagctggctatcttggttgcggagaccggggagtcagtcgagaattgtcggggatacttcgacgctgccgggggagtcttggccaacgcgctggctgccatctctaagcccatcgaacagaaggccacagttacccctactcaaaagtttgccttgtgcattgatggcggcggtaccaagtgtgctgctgctgtggccgacggtcccaatgtcgtcggccagggctctgctggtccatgaaatctgtatgannnnnnnnnnnnnnnnnnnnnnnnnnnnnnnnnnnnnnnnnnnnnnnnnnnnnnnnnnnnnnnnnnnnnnnnnnnnnnnnnnnnnnnnnnnnnnnnnnnnnnnnnnnnnnnnnnnnnnnnnnnnnnnnnnnnnnnnnnnnnnnnnnnnnnnnnnnnnnnnnnnnnnnnnnnnnnnnnnnnggcggtcccaatgtcgtcggccagggctctgctggtccatgcaatctgtatgatctcttctcgttctgattctatcctatgttcaccctaatgctaactttgtctagaaccgatagcattggaaatatagacggagtcattgccacgttactcgacgccgcaaaggctgctctgcaagacgccctgccaagcgacgtggaacagacagaatcttcttggaaggaatgtctccaaacatccttcagctctgtctggattggactagctggtattgaccgagctgggctcgagggagtactagcacccaagctgagacaagcgttcggaatcactcatgaaaaggacctccggttaaccaacgacgtagatctgttgactgcgggtgttccacaatcattcggtacaccctccgtccttgtggtcattgcaggcacggggagtgttgccatgcggtacaaatggtccgaggatcaacacagatacgcacgttgtgcccgttctggaggctggggccatatgctcggtgatcagggcggtggctacacaatcggtatcaaagccattcaacacaccatgcgcgtcttcgagaatatcaccttggggcttgataaaactggcggtgatgatctttccaaggcggttgcggagaaactgggctgtcaggtgtccgatagtgctagccacgacatgttgaacaacatcttggcccagaactactctcaaggggtaaaggcacgcattgctagcattgcgccggttgttctcgacttgatggacaaaaatgagaccgcagcagatatcgtgagctcccaagtagctttgcttgttggcgaaactctcggtcgcttggtcaagcctgaagctactggctatcagccatccgaggcctccgtgttggtgttggcaggaggattgatgaagaatgagagatacagggccacattcgataagcaactggactcgcagaaattgtctttcaaaggaacggtggttgttgaagatgcagctcgttcaggtgccacctactcgagtcgttgagcctggttgggctgctttttccaaaaaatcaataaatagacttcttctacttcgcttataatcaattttcttctcttttttttctttgctcaaacactctattcgtctttcatctttttgaattgaaataacaatcggctcaaatttcactatcgttctattttaacattggaaccgcttcaatcaccgattccatcgccggactctggttccaaatccccgtgatttccaggccggcactatgcaagagatctctccactgtcgctctgaccgctcgacaccagctcctatactcatcatctgaatatctagggaggcctgcatcagcggcgtatcggtgtctggcaggacgaaatccacaatgagaatccgagaatagtccggcgccattgctgtcaccgtattgcggaggatcttgcgactgatatggtcatcccagtcgtggaagatagagcgaaagtagtacgcacgggcacctttgaccggttgaggatccatgaaattgtatcccatcacctcgattcctgcactctctgcctcgaccccttcgatcacgcttggtaaatcctgcagtaccattctgccaggcagatggccatattcccggcggaacttgcccagatcatgcccctggttgccaccaatgtctactaggaagacggtatctttgtatggcacggcatggccaaacagtcgtccgacggggtatatatcgtaccacatcggtctaccctcgcgacgactagccatgtacgagttgaagagctcctgctgctgggcatgactcgaaagccactcaaactgactctgaccaacggcccattgcataggcgactgagtataatcctggggattggcatagccgtgggagcgcagatactccggaagtttgctcagggttggaaaggtaagatcatatctaaacaagggtcagtgagtaacggcgcgaagagacgcaagccaccaagccacatcacatacatgcatgggattccatctctcccaatcggctgagtaagtgccaccgtcttctcattggcaacatagagctcgggagtcggtgtgacgcacagcccaagagaagccatgacacgcatcagtcggactaattcacggagttagccgaatcacaatgtgtgacgaactaatgatattgcaggaaaaagtaccaattaaatcacgctcagcgcccgtgtattctgccagctgagcggctgaaagccccgttcctctgtgccgcttctccacaagcatggcgaaaattcccaaatcaatgacaacgcgcaatgcagcattttgaggaggctatagtccagtcagaatgagaagtcagttttggtccgtggaacgcctcacctggtagatcagacgcaacacggtctccgtcggcgtttccactgcagacctcagctcgtcgatcactcgtaatagctcaaagtgggcttgtggcgatggctccaaggcttctttcagagccatttggccgagacggctgaccaaacattgaaagggtgtggtgatcgtcattatcgctgttcaatggaaagaaaacaccgatacttagtgtggaattctctgcttcgagtagtacaagctaggatgatggaactatttggctggatctcgattgcatcttatagttcatggcgcaccccttggtgacagtaacatcggacaagtaaatgaattaaagacccttgtttccatcggcgttcaattcattgctacaacagacggatgcaatatgggtaagcttacaccgaaaacagctgaaacccggggcatatcacatctagacgctccactgttcgatcattcttggtccatcgtctgaatacaccgcatttgagagagaagttaacccgatcgagatgacctagggtgtacgatttgaatccggaccatctgcgagtgtctactttctgtactcacattatcctcattggactttactttttttaataaaaaaaagcaaatcactgaacgatcggcacaaaaaaggaatctggcgatgtggctttgtgacttatgctataaagactgtgatagtgatcactagccgctgccaggtcaatccccaaaacatttcagtgatgccttctcttccaaataccattaagtccgaatctgactcgcgatggaagccagctattgcaacagttagtctgggagcagcgcatttacaccccattgtcgccaaactcgatgctgccgcctggaatggtcagcaaggactcgaactctttcatgatgatatagcgcagctcgccaagacccttcgcgcccatgcaactgacagtgccctctgcactgatcgggacttcgagatcgacgcagcacacgctattcgagatctatcttctgagcgtaatctacaagttctagctctccaacctttccgacactacgaaggtctcattgatcaagaacggcatgcggaacgtatcgacgaactcaagcattgggtgcagttatgcaagattcttggcgactcagtcttcatcctgatcccatcatctttcctcgacgcctcggagatcacctccgaccgagaacgtctcgcagcagacctggccgaggccgcagatgtagcattccccgtgcgcatcgcatacgaggccctggcatggggaacatacatcaacacttgggaagactcatgggatgtgatcaaacgggccaatcgacccaatctcggcatctgtcttgacacattcaacatagcagcgcgactgtgggccgaccccaccgccgcaacagggcgacttggtccgagcgcagaccgagatctgcggaactcgatggaccggctggtacgggagattgatccagaccgagtgctgatggttcagcttgccgacggcgagcgggtagcccccgagacgcccttccttcacgcaccaggcctgccaactctgctagcctggtcgaggaatgcgcgtctgtttccgtgtgaagaggaccggggcggataccttccgattcgcgaggtgacggatgcctgcatcaacggtttgggttataccgggtgggtcagtatggaggtcttctcgagatccaccggggaagataacccggccgtgccgatggagcatgctgcccgggctagtcggtcctggtggcaggttctggaatttttgaaagaaaagtcggggaagggatccatctaggtcttgagaggcttgaagatcagcgcattttgtttcagtcagtgttattctacattttttcggttataaatggaactctgagtgcattcaattggcacagaggaatgatagtcttggtggtaaaataggccagtgttttgcaatatccttttatcgtattctcgttcttgatgtcgataaaccagtcatgctcgaggcctacacacatacccttctgcaatccaaatgtgttagatctcaaatgaggaaaccaataatcattccagaactccgaagaactgcatacccaaccaaactatcgggtgcatctccttctaacggaacgctacaggatcattcccgttaactggaatgttatgcccaggtctgtattttgagactgagaaaattcaaaataaggttggaatgatccgcgtagaccgatcgaacgggtcggcattcttgaatggttcccgagaacgtttatcctcctcggatactcctccgtatagagatcagaactccacagcacattccccggcttcccggatgcttctgccggcccgctcccgatccaatttttagagtggagtctgcatactagatgactcccaacgctgtagtgttctctaaggttcctagaaaaaacagctaaatcccgtttgacatggacctcgatgtctagacttaccgctgatctatcttcaagggtggtgcgtcactcttctgtgtcattcccctagccaggggtgaaaggagacgtctcctgcaatatacgctttcaggtgagacatcgctgagcccggccctttattcgttcgctgtctagaatggtcttagtccgatttagcactggtggaagagtaagactgttgtacgttacgataaacctgttcaacaactttgggatatatatgatggccaatgaaaacagagcaaacacttcatcggggcatatccgagcacagcgctttgtgtagcctttacttatgagacccaaattgttccagactgaaggccaacgttcaccgccgagctcggttacactgattggcacactaggtttcagagtcccagcgcagatctagacctaattttatgcgtttaggtatgttgcaactcattatcacattgaagctctatcacacaggttccttttttttccggcgtctagtagaaagccttttggggctatcccaacggcattttaatcccaactgaggcggatgtgtcccgggcagctctgcggtgtaacaattgccgctggttgcgattgaaattccactccgaatatggagggaaatgcagaatgtatgcacttggttaaagctagacaaaggaataattcccaaaagttggaatctggccactagcaaggtagctagtcagtagcctgagccacagtagatgtagtagaccaatctcgacgttaacggaacgccactgttggatcctcggcgaatgaaatctctggttccaagctgagcgtttgctagtgacacaaacgagtccctcggcgatccagtcctcgtgcattgaaattgtgctgctgtacatggagtgtatgcatatgactatccctgagatattattccctcaaatccgaactattcaatatgcgccttgatgacttttgttggaatctgcatagtcatcacagcatagtatcgggtcctttgtttgctactaggccgatccctgtgatgtgtatatccttctcccgatgcagaaggacttcttttcccggacatcccgaatgcagtcagtataggctcatttggaaacatggatcattgaagcggtctataggagcacccgtcccttaaatacgggttggccctcaatattgcactcgaataccaagctgctgtgatacccttcctctcattctagaatcattctgtactcataatgggtatccaacgtgggagtccggcagcacaggctggcccctccggcactatcaacccgttggtgcaagagtttggatcgcttcaagttctcgacgacttgattcgcttgcgagctgctgattctgttcaatctcccattcttgcctatccccgtttcgacaacgatgcagcttcctatgaatactacactgggaaacacttggatgctatgataaaccaagctgtcatcatgctcatcgatgatggattcaaacaggttggtaataacttgcgctgcgtgatgtcatctctaacaaattaatcgctaggcaacgcggagtccatccatcgtggcacttcttacattgtccgacttgaacatggtgatcacctttttcgccctaagtcgactgggttatactgtcatgatgctctcaccgagactttcgggcgaagcctgcgtgtcattgctagaaacggtcaattgcgagtcaatcatatatggccaatcccccaatatccgctcaatattgggcgagatcctttgccggaggctagtgagctgccgcccaatgctctcatgctcttcatacaacaaattacaatcgtcatcgcatgttctgcgtctgcgtcgcaatcgaaatcctgaaaaggtcgccttgatccttcattcatcgggatcaacaggcaccccaaagccgctcttcctcacacacaaagcaatcatgactcatcctctgcgaggtcctggttttacttctttcaataccctgccatggtatcacctccatggcctatccactgcattgcaggcaatgtggatgagaaagacagcctatatgtggaacgctgcgctgcctttgactgcagaactcgtggccagggccctcgaagaggccagaccggagtctgtagcagcggttccatatatgctccaaattttgattgatgatccccgtggtataacagcgctaaggcaatgcaagttggttacgtacggaggtgcaccctgtccggacgagctgggggatcgcctagtaagcgaaggagtacactttggaggttcattcggcctgtaagtactattctgcgagtatctacagccatgcaaagactaacaatctgcagcaccgaagctggccttgtggcagaatcaatctcacgaccgaaaggtgacccttattggaactatctgaaattcttcgacaatatccgatcatatgtctggatgaagcccatctccgaatcagatctgctcttcgagtgcgtttatcttgctggtcatccagcgttgacaacctcgaattcaaacgagccgccaggatccttccattcgaaagacgtcttcacccctcatcctacaattgccggaaggtggaagtacatctcacgattggatgatcgaatcaatctagtgaatggcgagaaggttttaccactcccgattgaaggccacatcaaacaacaccctttcatccatgatgcagttgtcgtcggggtaggaaaagctgctccgggactattgatttttcgagcggacgaacctgaagccaatcgtctctcagacgaagaatacctcagtgcaatctggccgacaatccaagaagccaactcccaggcagaggccttctcccaaatctcccgcaatctggttgctatattgccacatggcgccaagttttctcgaacagacaaagggtccatgatccgagcacaggtctatcaggaatacagcgaacttatcgaaggcctctataccgaagggaaacagatgtacgggaatcttcagcttgacgttgtggagacagggcgcatcctggttcaactagccgagcacgaacttgggatagccctctctggtgtcgacgccaatttcttctctgaaggcgttgacagtctcaaggcaatccacttccgacgtctcattcttcagcatttcaagtttgaggtaagccagcctcctggtccgaacgtcatatttgaaacgggctgtatatcacagttggctcggcatatctgtgctttacaaaacggcgagatattcgaacaggtcgggagtgatgtctcggcgatgactgaattgatcgagaaatattctgtgtttgagaggcacattcccgagctacatgattgttcaggtccgaacagtgtagtgagtgtttatcctatcttgctgtcgcgaatcaggttcagaagctaacatagccaagcttttaacaggagccaccgggtcgattggggcccacgtgttgtacgagctgcttaatgacgactccatctcgacggtgtactgtctcacacggcgagaatcgccactggaagcaatactctgcactctagccgacaaagatcttctcatatccccagaacagagaatgaagatcgtcgccttcgatagccgcattgaccaacccgatttcggtttatctctggacgaaagtacaatcaaccacatgctggattcagtctcgctcattatccacacagcatggcccgtcaacttcaatctcccactgaccgagttcgagccgcacatccagggactatacaatctgatccaattctccctgtcggtgcagagacgcgagcctgccgtcatgatgttctgctcgtcagtctccaccgcgctcggttcccgagcagccgaaatccccgaagaaccagtcgatttggattgcgcctttatgggttacgggcagtctaaattggttggggagcggattgtgagtaacgcgcggcggagtggggcgagggcttattcactccggattggccaggtctcaggccactcgaagaagggcctgtggaatgactccgaagccctgccgctgatgatccggtcggcgctgacactgggcgcattgcctgagctatctcagccatgttcttggctgccggtggataagcttgcgtccagtattcttgaactagctaggacttgtgctacgccgagtgagtttggggaaagtcatgcgtccagctcggctttggagtacgttgatgactcgattttcaatctgtgtaattctcgcgaattcacctggtcatctttgcttcatacgctgaaggattctgggttccggtttgatgtcgtgccttttgaagaatggttgctaagacttcgtcggagtgagacaaagggtgaggaacttgtcaatccggccgtcaagctcattcatcattacgagacgatgcatgggaagaattctttcatacagaacagtctcaagaggtttattacggacaaagcagagaggagtagtgtgactttgcggaatggccgactgagaattattgatgatggaattctgagatgctatgctcaagattggttggcgaggtggacagtctagggagtgaaatgtttaaatttgggctaaagggtgtctgtatatattgttggatcactaatagttcgaggaatcaattcttcattaactacttatgcttccttttgtgtgcaatgtgcaagaaaaggcaagacgacggcctcggaggcaaaacacagactgaatacagactgaatcgaaacaaaaccaagcaggatacggccatctatagggcctgctgtactgtacaataaaaaagatgaaatctgccaaatttggaccagtttcaaacgcgatctagaacaaatatttaagccaaaaacgcaacaattagtccgacaaagagagctgggatgctcatggacaactgatagccagcaccggtgaagacagggctagctccagactcagacccggtgggaacatagtagccagttgtagcggatgtagtcgtctccggagaagcagcggtagtggcagagctctgtgctttggaggctttggaggcctcatatggaacgctagaaacaatggcagaaggaaccaaagaaggaaccgcagaagaaatagtagaagacgcccatgatccaccgaaggtctcggtggggagggttgcaacggacgtagcagcgacaggaacagctgcaggcttcgagttggtgtggctctgagcagttgggacgtatgcgacactggagggagggaccacggcagctgcagaggtccgtgcctccgtagcttgggcggtggctgggatttggacggattgcacagccggagcggagacagttgtcgcaacagaggactgtgcggcaatagatgaggactcctcagcctcggggcagaaggtcgcagttgcagtgactatagaggtgatagtccgagtcttcttgctggcgatgctggtcgtagtgctggtgctagtagtgctggtggaaggttgcgcgactgcttcggtggcaatgctttcggtagtagctgcgacagtaggaaccgaagtagaagtcagttcctgaactgcgccagcggtttgagtttccttggaagcaactgagtgcacagtggtggcactgtgagtagtgtgggtctcagtagttgtctgcgagactacagaagtagcggcagtggtagccgacgcggactcggatgacgaaatcgaggcaactccagtctgatagatcttgaccgagttaatctcccagtacgtctccttgaacttggccgggttgttggcgacgtagttgtggcagctctggaaggaatcgctatcggtcacggggcagccggaactaccaaacacaccacctgcccagtctccgcagaaggtgacatcaaatacaaacgactgggccttgaaggagttggcaacgtcgcacgactcctgtaccacggccataggagtgccaaattccgttacatcggggttgccgctagtaattgaggccgggatcgagctgcgagggaagtaccaaatcttgaggaaatcgtcggtccactgcagtgagtagacaccaccgttttgtttgttgaaagatgtgccatagctgccctcctgaccctcgaccttacaaccgatggttcctatatcctcaccacaccctgtagcattgaccgaaccggtcatatccgtatctgtcaaactgcaagtgccggctgtgtgcatgacgatttcgttgtaatcctgcaagttgacaccttcgatgatatcaatctcaccgtctgcaggccagttctttccgacagaccaaaaggcaggccaggtaccgcagacgctaccaggcatgtgggcgatatcggcgataaccagcgactggtcgtagtatttcttgctgccaatacgtactgagtcacggcccgtgttgccgttggggttcagcttggtagcatgatcgacaccgagatatacactgccggtatcggtgaccttgacgagccctgaactttcggcggtctccttgtcgaggtagttgacgaagccattggtcgggtctgaaccaacgtgaaaattgaaatagtccaggaaattgttcccctgccaagtctccaccagggagtaactcgtggcggccacgggggaagataacaaagcgagcatcagcgatccagcgctcaatgaaagggttgaagaaaccatgttggaggcgtataacaagaccagatgcttgagataatccagaaagcaacgagaataaaatgagcgagagtgagtttgataaaaagagagactaaaagaaagaccgacaattccagattgtcaaagattgtcaaggagaaaagaatgtgagcgtgtccaacgtacaacgcagcaaaagtgggaagtatttggcccaaatacctttcaccagccgcacacgcccatattgctttatgctaaaaaactggagatcaatcttgtctatccagtgacaatgcgccagtgcctgagaccttctgtaataggctgcaactccggagtcaacaaaccccgtggcgctctagtccaggaggccagtccactcatgatgatccattcttcagactaataggccgaacaacataaaggggatcgactggtcgctgtcacagcggttaggagtcactttttctcaatctgaaaccactagagtccaccaaggggcgacccaaaacaagcggtgaaacaggagaatctttgcatttgaagaggagaataaaaagagtcgacaaagaaaagtatctagagagtaattcacatcgcgatctcccctcattccttcatcggcacattccacgtcagaatcaggatcaaaatgtgcgatgttatgatcggagttgccggctctccaccttgcctctttcgatctacatatccacttggctgccgttgggcgcttatgtgtaggttctcttgtaagtctagactgtcctttgtttgtctttgttcagctaatcagaatatatccttgtcctggtgctaatttcaataagccacataatattaaacattgaagagacgtcacattcccgaacccgaggaatgtcggcaacaaagcaaatcggggaattatctaccatcgtctatgctggggtatatattctaggaatagacggtgatgatcgtggcaatcccccaactcctacaatgttataccccgtattggtggatagcaaattatagattaggtatcttttgtgtggcaatcctatacaaaaggtacagaaacacagcatagtttaattgttccaaccccacgataatgcagtcatgtgttatattaaaaagccttatttcagtgcagattaaatctttcttctcgcagccgagtctagatccctaatcaggccgccatggttgaccgatatatatatgtgacgggtgatgtgctggcatttctcatccaccaatgttggccctttcttgaaggtggaatgcttatcgcgattgacaggttgctgtccgactcttccaagatttgttcaaatcgtattctttgagttcttgactgttttcgtggttttacatcgtcgtatactcggattccccggacccgctatatatatcaaggtcctttatggagtgatgaacatgcccttatcgtcttcaagacttttccatgggagcaaattcctataatctcgagatagggttgcagatattattggtggtcggaactatgcgctcggggcatttccgatacttttagtacctattgcccagctgtgatgacgatgtgacgttgttaacccgggcttttctgccgctatggcctccgatattttaatgatcttatcagaatcctgattttatctttgtaggttcagatacctaagtccatgatgtcaagcttgggggaagccaaagatgtcaatttatctatcgaagaagaagtgaacgcgagacgaggctattcagcgtaagcttggatgttctgattttatatagcgattattaatactttccagtgctcttaataatcctaaagtatccagaaagtccaaggataatgcattagacctactcaatgatgagcttgacggggacacacctcgacattaccgtgatgaggttccggaccagagtacagactcgagtggtctagttggcgtggaaaagtaagtgatactcatgtacaataccaagtcgattactgacaatatttttccagagctgcacctgagtatcacgataatagtgaaagcgaggatgactaggtggagagacatcatccaggatagaaattgaattacgttcacgcattagcatattctgcaggctataaacaagcttcttcgtagggcaagtgaggcaaaagaaatgaaatatctatgttctataactcttgttcttttcttctactccattggcgcggtcagagtgctttcttcatccggccaccttcggaatagatcctggagatgatccaggggagctgtgagcaggtcgactgcagtctcatagcgtgggttgtccagatcatgtggatgcgagcgagagggcacaaaaatcttagtgcggctcagagattcagccaacttctcgctctcgtcggaagtgagggactcctctaatatggccagatcattggcctcttcgtctttcatatgctgggcaagaccttccatcaacaatgtaattgtagggaagaagcgcggatcggaggagtttagatcctggaaaacgttgagcatttctttgagctatgtcatatcagcatcgctctccatgaaggatatcaacacttaccgctttatgctcacgccgatcatcatctagctgctccttgccagctcgaagcttttccagtgcagggaacactaccagctcctcggcgacggcgtgtcgtgcaagctcccaggtgaactggttctgatatcgggtttgttcatcttgatcttcagagttgacaatgatattgtaataagattcgagtttccggtgatcatctttgatcacgtcgcttatccgaaccatgttggctgatatagtgaataaccttgagttcatcttaacgttgcctttttgttagccgcattttttctggttcactgaagttatcatgacgtttcgagggttctatatagtaatcccagcgtcccgtggaacgtgattccgaactgtacaactccgaacatttactctggttgagataacgtgatcggataaatatgtcttaaagaaatccctaaggacatgctagcttccctcgaccccatgacttggatctgcagctgcctgatatgacgtccgaagtgcggtgattgcttatttgctgctgcaggaggcccgagtgcctgaacggggcatatgctttgccttggatacatctctcgtattccagtttttctttctacctcacctccactttggcatgagcaaaattcgcaatgaacgttttagtaaaaggagaacatgaacaccggttagagctctcatggttattcaaaggttggatgaaggctgacagtactacagagaacagatccctcgtgatatgcctacatacgagcagatggagagtggactttgcggtcgcgtctcccagtggctatggtctggatggcggggtacggcattcgaaggtgcttccccagatttgcaaaagccataccagctgaatcatggggactgtaaggcctgtcgtgaacaacatactacctgtgatcatacacgacctcagtgctctcattgttggtcacagcagctcttgtgcttctatgtggacccgaaacggaggaaacagaaaaatattcggaaggcaactttcagtgaagtggaaacgagttccgggttaatcaaggacacgacagcgtgactgtatcttttgttctcttgctcttattctcctttccgagtatttatatggatgataggtggttgtaggcctaacgtttcgaggctatcaaagtcctatatgtacttacaagtatttttgcatttctaccatttatttttcttttgagatacacattctaaggcccaagttatattccagtctcatttcaacagaattaaacgaggttcttttgaatctcatagagtgcaagctgggtgtaacgttggaaaatgcaagatttggcatcaaagtcgtctaaatgaaccaccacctccaatctcccccacctttttatgagttaccccacaataaaacttgcgacgaacgccgagtcggcacaacagcgcaacacccagagctgtgttcggaacactgtgacccgatacccgctccaccaacttccacataacttgggcctgcacttttcttagacccttcgaggaatacccggatagctgctgaattgctctttgctttttatgcagtatgagtcgttgattgtcaccagccgtggttgaggcagtttgcgtcactatacgttatatccatgtgtgattgattcgaggtgaaatcctatatagaccctcaaggtggccaatctaacctcagcacacagatggaatcggagtaccggcgactagcggatgctatccggaaccaggccaacgctcatcccaaatcacgctacctagttgccatcgccggcatccccggttcagggaagacaaccacagccgaggcagtagtgcaacagttgaatcagagttcgacttcgcgtgctgtcctactctctatggatggctttcacctttctcgggcagctttggatcagctgccgaaccccaaagaggcacatatccgtcgtggagctccatggacgttcgacgtgagccgctttgtagcctttatctctcgcctgcgaacttgggccgacgagaaaccgctagcagctccatattctggaacctggtcgtcagcggatgtcattcgcgcaccgacattcgatcacgaagcgaaagaccctgtggagaatgggatttctatcacgccggatgtagatatcattatcatcgagggaaactatctacttctagatgatcccggctggcgggagcttgctgagcttgtcgactatcgcgtcttcgtcgactctgatccgctagaagcaaggtgccgattggctgagcgacacctacgggcaggtattgagaagacgctggaggatggatatcgccgggtggatagcaatgacttcttgaatgcgatctccattcgagagaaattgctggccccggacattgttctgaaaagcgtgacagtggatggtatatgatatatatcattgatactacatattggacaaactgagcaacattcattcatttgtaactcattactcctttatcatctgcttgtggaatacatctaggtatatttgtcagatataagaaaaagccaggatattagcatattaaactcactcggaatctccggcatccagctcgcccgagcattgcagaagaattccccctttgggggtaatgcttctgggtcgtccaaggatccgacacagatgtagcgaaaatagtttttggcagcatcctgattccatttgttagaagacatccgtacccattgtataatgctgacataccccatattccaggatgaagctaccgcaattttgacaaaattctcgatgaataagagctccagatccgttatctgcgacatgctcctttggtacccctttagtaagattgaatgtatcctttgggactttagctgtcaggccatagttagtcccaaaagctttctgttcaatgattttagcttcggtaaaatgatatccccgttcaattcaaagtgtataccttgcagttacggcaatggcagagagatgttctcgcatcatcaatcgaattgagcttcagctcatactcgatatcccggcaaatacaagatcctgtgagagtaggcatgttgaagctttggatcactccgatattcgtgtgatatttcacgatgacgtcactagctttggaggtcacaccatctgatttctggcatgatgatggtgatgagcttagaaaacttaaaacgggagagaagacatctagaacagcccatcaaaaatttgacaaagctgtttatcctagtgagctgtcaaaataataatagaattgtctactaaagtgatgatgtgatgatgacggcgttgatatccggggcgaagctttgagcttatctttatcaacctttcttccgcagatctaataccttaaaaaacttatatctcaaacatctgatacttcaacgtcctacacccgaacagcaagatgaagtccttgaagccaagatcagtggtatcctctttcatctgctcaaatgcaggagaacccaaaattgccatttttcggcgaagtgataaagtcagcacatatcagtatgtatcctcaagtcccactttactataaattactgtagtccagatgaactgatttctctaggcaccacctcgcccccatctcgggcagtatagaaagtcccgaaagtccactagcagcagcatggcgggagttaagagaggagactactctcacctcacgagatatggagctttggcgacagggaaaggcattcacattcagtgatccctctgtcggtcgacaatggaccattttcccgttcctataccgactcaaagactgcagtgaaggtggccgcggcgaggcgggtcttcaaattgactgggagcatgaaggctggcagtggtatagtcccgacgcaatccaagacgatgacaagtttggtggcgtaccacatctgaaagaaagctttcgacgagtctggttcgaagttgacatgaatgatggcgctagcaaggcactgataactggcctgaaacagctaaaggcagatcatcagagcggatcgcacgagctgacctcgattgcgctgcgggcctaccgagatgttattgcgcagatgcacgaggatattgacacgcagtggtggaagaatgctcgcatggctgcatggcatctgtggaaaaatggacgagaaagcatgggggcagccaccttgaatgcatttctcggattgctggccgacatggaagttatcatacatgagaatctcgactccacggtcaaacgggaacgcttgttggctttgatcgaccagcatttggacaagcgcaaggagatgcccatgcgcatcaagcactcctttgcgacctatcttgaatccaagttcttgtctacaacacgctccaggcctacgccctctctcgttattctcaccctctcgtcgagctctaccatccgggacagcatcatagaagccttcgcgtctcttccaattcctaatctggatcttcgcatactggaatctcgtccgctttgcgagggggtcaatatggcatcttccatcctctctgccttcaaaacgagatttccctcatcttccgatcggcatctcaaattaactgtgtacaccgatgcatccgccgctcttgccagcaaggacgtagatttcatcctgctaggggcagatcggatctcggattcaggctcagtgagcaataaaactggatctttgccagctgttctgagtgccaagcatgtctgtcctgccgccaaagtcttggttctcagtgagctggagaaagtggccgagcctgacgccgagagcaatcggagccaggaagagaatgatccgaaagagctggtgggctgctgggtggaatatggcatcaaaggacttaatgctattgccgagggaattgatgctgatcgagataacacaaactacacagttgaagttaagaatatttacttcgaatgggttccggctgaactcatagaagcgtatatctgtgaagaggggactttggacgccactgctattcaagagaaggctcaacaagtaaagcaaaaggcggacagatactttggtcaactttgagtggaaattgattccagtttacttctgcctttccaacattatgtagtcgtgctattccgaatgacgtcacagtttgttgctgcacgaaataaaagttggtttcgattgcatattcgacctaccatagctagatactacatctgactctttccaaatgtcggaagtactcgatccaggaatccacacctttagtgttccggccaaagagttgatatttgaatatgtggtccgtcgtccattcaccgaaaaggaagatccacgtaatatcattgttgttcaatgccctggctggggcttaggatctcaatatcttcaaaatggattgcaagggttgtggaccccagaaggccataccagtcctgcagttactagtggctatactgtcatcttcttccattctcgtggaacggatggatcatcccaaccactagcatcccaaatgagcagtatgcccgatcttgcgtccgatttggaggacttgcggcagcacctgcatctcgagcaatatccggttttactgggccactccaacggcggggcaattgcgctagggtatgcggagatgtatcccagtcgtgtcagcaagctcgttctcctcgatcatcagctagtaggatttcgggataagagattgttgcagctcgaagcgacgcgcatagatcctcgataccaggttgcttgggacagtgtgccggatcggcataccgaatctgacgaggaatttacagcgtcggtgagaggcatgtggcctttgtgcttctttgatccgaagcagtatgtaccagagctactgcgtgatattggcgatcggaagctgtcgggttggtgccaccaagcccagggtcgatgtgataagaaattgctgcatccaatgcaaatggtggagagactgagggatgtacaggcagaaacactcatcatattcggccgcgatgatatgatctgtggaatagggataggggaacggacagcaaaggatattccaagcgcccgactgattacctacagtgaatgtggccatttcccctggattgagaaaagggaacagaccatattggatatccgtaaattcattgcaaggaagaccagcatatctctcagaatgtaaaccaaacagataaaatgttgcgagcctgctaatgtgcattgattaaaccaaatgtatcattgtccatacagtaaatcacacgctaaggcggaactgaatatctccaagggctttggtaaaggagaaaaaacatcaaaaacccgaccaagaccatagggtagaggacaggatcgtcaaagacccctaccccatagaaaaaaccaacaaaatatattcacggaaggaaaaaaggtatcatcataatcaggtgtcacgaacacgcgcctgtcgctttgcggtgccaatgtgggtgttgtgcactttcgtggcgaacttcaagctggtcaaggtctccgacatatgagcctggagagggctgaccataacgaacatgagagttttggagtttccacccaaggagaactggagcaagtaggtgagctggaggataagttagtatctggcgaagaaataaatgttgaaaaaaacataccttgctgttccggtatgggatgtgacctccctccttgccttggccgagagctgaaatcacatcgcccagagagctgagactacggttgatgttttgagtctctttcagacgctcgcccgtcgccccactgtgactcagacgttcacttcctgccaagtcaaccaggtttagggtgccttcgctacgttcgccggtgatgtggttctggccggtaagcttgagaatgaagacagagtgggaccgcgatgagcgctcgttggccttggtcgctgctaccgagcggttggcatccgcattcttaagaatagactcgaccatctcgggggagtccaaattgactgttgtaatgtcggtgatagtagttttgccccgctgcatgtcatggcgaatctcgtgcttcttcttgtccaattcatctgggttgcccaacagatcattgaggttttcgttgtagacttcgacaaagttgcctgccattgagtaccgccaacccttctcttccagaccttgcgcggtctcgtaaatctggtgaacagcacgagggatcatgccgtcggccgatgacattgtgtgtgtctttccactaccagtttggccataacagaaaatgcaaacattgtagccatccagggcgctctgaacaagctggctaatctcatcaaagacctcggcgttctgtgtagatggattgaatacacgatcaaacgagaaagtgttgttcttcctggtaactgttccaaggctggtcctttcttcgggaccaagaatattaatctcctttccatcatcagtttcatctggatactgcataagagtgagatcggaagtaggttcactcttaagcgaggggcgaactcggcagaacacgcggatgttgcctttgagctcttgcacctggttatgaagtttgcgtcgaagtgtctcttccctgcgcagcttctcttttatcgcctctgtctcggcaaatgcatccatcatctcccgattgcaccgctcaaaggatttagactgctcctcccgtccactttcaaggaactcgatgcgtgccttgagagcacgtattgatgactctagcgtaacactgttgctacttgtggtatccaagttgagtttgagttcttgcaccatccttcgttcgcggtcgacctctgccttcagggcatgtagcccatccttcaatgttgtgatttcgcggtccttcctttctagctcaatttgcgacttctgaatgtcaagcgcagattgggaagtcagcttgccgagcgcgcttactcgtgctgctttctcgtcttcaatctcacggtcaaaccgtcgtttcagatcgcgaacctcctcttgatgtcggtcagtgattgtggcgacttcccttctgctttgttgctggagtgaatccaattcaatacgctggcgctggtaaagatcatccatagcgatttcatgctctcgcttgtcctctttacgcgcctgctctgccgtacttagatgatttcgcagcgaatctaactccaccctctgggtaatattgagttctttcaattcatcccgagaggcttcgagctcgttgactagatgaaaggattagattcgtctcaacatagcccttatcagactcaacttacttctggacttgtagatctcaagtgtctccttgagaccggagcttgcttgaccttgttgatttacctgggccataaaagtctgcatcaatccctccatactcttttcgcgagaagcttgatcccattccgggcctgtgatattgtcaaaacttctgatcgaagaacctttggtcaaaaatgcggggtgggagggcttcttgacaatgcgccgctgggaatatgatggtgttctagggggtgcagtgggagcggtaaaataagaagaagaggacgagaatgaatgcgcatatccgggtgactttggggtggtaacagtggagacattccgaaatggggtactgggcaacacggggatagttgctagattggaaggctttggcaaagagacagggttctcagacactgggagcgctgccaattcactaattccattccaaccttcatccaatccgggggaaacggttccaacggggcaagaagggatacggctgggagatgagagaaattgtagcataccctttcgttttcctagcacactgggagagacgtcttccatatgggtatccaaggcgctcgctgcgcgggggatcgatgcgccgacgggtctgcggccgataaaggacgattgatgccgggacatggccgatgctgggcgcgtgccagggccgacggttgaggaaaaggagccgttggctgcgcgggatgcaggtgcaatcggccgggacatcgttgaagacgagtacgagtttcctcggctatgcgccctggtcgtggtgctaggctgtcgagtgacggatccaggtctcttgatttccgggtttccggttttcggacgggttgcttccggtgctgtcagttcatgttgctccaacgagtcaggggcttccatacgcgacgtgctgatagccttgtttgcgattgtacctggcgccatgatgccagagcgcgagttggttgtcgcagagctggcttcacgtaggccggcctgtggtagccgtgtccgagtagacgacctggttctggtctgaagatggtcagttatatccgcaggcactctgatgaaactgaaacccacagtggggtacttactatgttttcaccgtccatcttgggatttgttgaccgccaggttaccggcgaaaagagtatccgggcgagtaggaggagctcacgtcgagccactgtctgtgttggccgcttggacttaaagtcagcggaagttaggatgaagccagcagttatgttacataccaataaatggtctgggcagtaacctttggaagtatgagtatcaaatgagcgcaaaccggtttctagagggacgaaatgcgaagtaaacaaagatttgctgactcagacatgtgtatgacgctagtccatatccggtaatagcatcagctatcccgtattcgtattaccaaggaagtatttgaaatcaacacgtgatcaacccggaaaccaaagatcaaaggcttcaatgtccaaaatgaaacaagcacagacaaaagaatagattatccgaggctagagacgaccaatcctgttctttgttgactcctttttgaggttgttccgaaattagtagttgattcgtggggcgtctttacctccactcgaattcccgaaacagcggccccagtagccccgttgcttgagcttctccaacatctccttcaccaactccttttccttgctctacttcttttttgtttgctctacgtcttcgtttgaacacttggtaatcatgtctgggcgttttgttcgttcctccaaatatcgtgagttacctctataatccaacatgcgcctccccgctgaccgttacaggccacgtcttcgggcgatcgacgagaaaggtaaaggctacctcctataccaccggatctcctattctgactttcgcaggatcaatgctacgataatcttcgagtctcccgaaacgcctgggataccaacctcctcaaggtgtgtgttttgccttccgcatcacccctgacgtttcactggcgaacccggtcttacggcgcatctaggtcaacccgaaacacattgcggtcaattgggaagcaggcggtggcggagcttttgcgattattcctcttgaggaacggggcaagctcccggagcgcatcccattgtgtcgaggccacactgccgtcgttttggacactgactggtaaggaattcggatatagaacccccgcgtcgcagctcactgaaaccctgcaggaaccctttcaatgacgacctgattgcctcgggatccgatgacggcaaggtatagtgcgaataaacaacagctatcagcgttgcgactaactaattccaggttttcctctggcgggttccggagaacttcaccgttcggcctgaggttgaggccgatgacatccaggatctcgcgcctattggcaaattgagtggccatcctaagtacgaatccttgactaaacccgttatggccccatgcttacccctccccgcaggaagattggccacgtgctcttcaaccccgcggcagaaaatgtgctggccacggcctcgggtgactacaccgtgaagatatgggatattgaagctggcgccgcgaagctcacgctcaacattggcgatattgtgcagtcgcagtcgtggagtgccaacggctctttgttggtcactacctcgcgtgacaagaagctccgcatctgggatgtacgacaggaacgaccggctcacgagaccaatggccacaccggtgctaagaacagccgagttgtgtggctgggagagcgtgatcgcattgcgactaccggtttctccaagatgagcgaccgtcaactggcgctctgggatatccgtgccatccgggaacccatcaacggcttcaagaccttggattccatttctggcgtgtgcatgcctttctgggatgatggaactaacatgctattcttggctggacgagggtgagtgcccatgatttaatccttaagccttcgcaatttctgacaacaagcagtgacggcaatattcgatactttgagctcgagaacgacaagttcgagttcctctctgagcacaagtctgctgacccccagcgaggagttgctttcatgcccaagcgtggcgtgaacatgcatgagaacgaagtcgctcgcgcctacaagaccgtcaacgatcaatacatcgaacctgtctcattcattgtccctcgccggtccgagaacttccaggacgacatctacccgcctgcggccggtgtgtcccccgccatgtcttcgtccgaatggctgggcggcaaggaggcactgcctcccaagatctccatggccagcctattcgatggcgagggcatcaaggaggtatcaggagtgcaagaaaagccgaccggctcgctggatgcccccgcccctaagcctgccgaggcacccaaagccgctgagactcccaagactgctgagcctacgcccaagcctacttcttcgacggcagttcctaagcccgtctctgaacctacccccgccgcgcgctccgccccttcgatgaaggaacagggtgcttcaatggctgccatggtgaacaagttcgccgatggtgaagaagagactactgtctcagacgatgacaactcgagcttcgaggaagttgccaagccggtggagcgtcccactcgccctgccgctgccgagtctgcttcgcctcgcgtgagcagcccgttgaggccgaaggaggttgagacaaagcaagttgaggcaaagcaagtcgagacaaagcaggctgagacaaactctcaacccaccctagttgtaagttccccgctccccatctatatttgtcaaattgtgccagctgctaacttttctagtcctctattgtcccatcacccgctagcgagactccttcgcccaccacttccgtccccaagaacgacatcgagctgatcaaagacctgatcgccgaacagacaaagacgattgcatctcaggcactgcaaatgcaaacactgactgccgagattgaggcattgaagagcaagctgaactgaataatgtcgtcctaattttggtctctggagactactaggttggtcaaatatcatttaggtacattcgttgttgggagattacgctccgtattggaatcatgcggtgttcaacgtatatgaggcggtgcagtgtgtggataggtttttttttttgtttcttttagcggaattgtcaatacatttgcccattaaaatcaaaattcggatatgatgttcagtgaaaagccagctagcccgctagaacactcctctacggcagtagattggctttatggctcggagttaacacatgtacggagtaactaactgtaagctaatgatatattaatgggctggcaatatgctactagatgatttgaaggtgttgctcctaaatctcatgtgattctattgagagtaacaccatgatatatactagtgatagaccatgttagcgaagataattgtattttcctcttttactttgaatgatcgcagcaaagtagagattagagtaaagaattcatttccctcactcggagttccattggctctatccctaagaagccatttcaaatagcctacgcaagtcccatatctactgttgagcaagttcacatactagctcaagggaaaaaacaacatacaagaaggtaaaaaagcaaccttgagcccttgacgccatgccccatgattttgtactgaagggaaaaaaaaatcgaactccaagctcagagttcatcttcgtacttgtagttgatgcggcggcccgccaccacacggtcctgccggctatcacggcggcggccagacgacttggccttgtcacggtgctgctgctcacgctcgagacgctccttgttgcgcgcttcacgctcaagggtgtaagggtctttattgatctcggccctcttggttgaggttccgttcgtgtcgcgactacggtcctcatcggcacgtttcacacgacgggctgggggatggtcgccgccgatggcagacggggaccgatcacggcgagagcgcttgcgatcacggtcacgatcacgctcccttggtcgatctcggtcgcgctctgaagttctgtctttatcgcggtcgccatcacggcgtcgttcgcgatcggaatcgcggtctctgccacgtcggtcgcggtctcgctcacgatctcggcgtcggagatctctgtcctgttctcgtgatctgtcgtcttcgcgtcggcttcctctgtccttggaggagcggtaggtgctgctgattcggcttgctagatcgcgcgaccctggggcttcggaggatgctttgatcctgccgtttgatccatctttctctgcgaccttttctaggcgatcagagggacgggaatcgccctttcgactggagctgcggctacggctgcgatgacgacgggagcgttgcgaccggtgcttgtctcttctatctcgctcccgatcactgtcgtgatgtcggcgccgcgaggatggacgagaggatgtgcgggatggagagcgagagtgccgggcgacggattgtagctcatcaacccgatctaggcgtttggtctctgccccacgccgactgtcacgatcgtcttcagtaccacgaacagatggtgaacgggggcgagaagttggattttgcgagggagattgagatcgagaatgcgcacgttgggacagagcgatggatgtagcctttgtgcgattatcctcagagggttcactactggtcgttagcatttataagacaaaaggaaagatagaagaggaaagtctcaccaggagatactgcctcgaccctgaatctggaagccacgttgtcgcagaacgctggtgttgggtagcccctgccgcatggcacgcggagcagctggagcgccttcgacgcccggccccggttcttgtccatatcggccatacctgtattgaccatactcattactcatgtgaccgtatccagggccagttggtacagaattatcaaggctgtcaatggtgggaattccttggggttggtctgtggggatatcttctggattacccggcacatcgggtccagtttcacctgattctgcagtctcatctgtttggacattaccttcagcatccattggagtaccgttgaggccattagccatgcttgggttctggttgacatagcctgagttagcctgacggtaatgaccttgcatgggtccaaagccacctcgaccggggccatgaaactggccacggccgcgacctcggtatccaccgcgaccgtaaccgccatagtaaccggactggtagtctgagtgagaagggtaagcagacatattagacccgccaaatgcacctccataaggaggacccgtgccatttgcgaaagcatttggattgaatttattttggccgccttgccacatattgttgttctgttgggatgcgtcccatcctaaggatccatacatgcccccgttgtagttcatcccagtgttcatgcccatgccagtcatgttcattccgtacatcccctgacttgccatcgggtccatccccatcggcatacctgtggagagattagcgaggttgaaacggcaaatctgggtaatattaaacttacccatcgtattcgggtaattgaacatgccagccatgaaaggattcatgccgtttccgttccagcccatcacggggaagtttccagccacgtttgagataccggattccccaggaacctccccaggagcgggaacaggttctccgttcagcggggtttcgttaactgcggcatcttcggtcgtcgattcaagggccgtttcggtaccgttgagttgatcaccagttgcctcgggctataaatagggtcagtttagaaaaagaagagttaatacagcagtaaaaaatcacctgagctggttcatttgccaaacctgggacacttgggtctgcaatgctctctccaactgtggctggcaccgctgtgtctggtcccggcacttgagacttcgactctgtaggctccgtatgatccgccgtctccacagatgtcacctgctcaaccgcattttgctcgggagctgccgatatttttgtatctgcaggtgtgatactggatggtgttggaggcgctgtagattgacggtccttttcccgcttcttctcttcggtgcgtaggaaagccttgagcgtggtccgcagagccttgttgggtttgcagagatcgggcgagacgggggtgtgtgtacagacaggacatgtgtccgagagagaagcttggcctataacagagatcagattagctaccatttgcgacaggtgcggaactctccaacatacaggtctcacagatggactggtcacaacaggggagacgaaatgcgttcaccgccagcttattgcacatggcacatcgcagcttgaaggggatctcatcttgggccagggtactgccgaatcattagcatcgcgaatttttggtcggcatatgagtactccgtacctggcaatgtccatgagagctggcacatccgccaccaccatggctggagatggctggagatattagatgagctctgactagacagaaagctccagtgacatggcttcaatgtccggtaaaaaagtgtagaggttgatgctgtgaatttggtcggaaaaactatttagccgaagttacatgtcagagagaagtaagccgtgggcatctgggaactaagagatgacgccgagcaaacaaagtgcattgtgcgatgagaccctcagattagatcaagttattttgggcgttcacagaagaacagcgatacgctgacggtttcatctggttcaactcgacgttttttgcatttatcgtcattgggtatttggtattctacgggtgcctagagggggagagaaagggtggcgacctacgatgtatggacaattcagtatattgagaagttgaaggtaacaaagaggagagggagaatacaaggcaaacaagggggagaagggatcgaattgaaaaaaagcgacaaaaccgaaaattgaaaaggtgaagaatgaaaagaatgaaatttcaccgagagaagaggatgaaagggcaaaataacgtgcgattttgcaaaaaaacagaccaaaacagtcagacgcggtaaacacattacgaaaaaaacaacgatggaatttaaaaaggacagcgacgcccgtcgtcggactctcctctccagggagcttgggccacctacttttcgcgattccacttaaatctttttttaaattttttttcgcttgaccatgacagagaacaattatcggcctcgctctcctgatctatctcttcctcctcctcaacaatacgcgcttgcgagtccaattacatcccacgaatctcccttcttcaactcataccaacctcaccaacgcccaattctaagtcgcgtgggtcaacaatacgttccaccttatcagccagactcggacatggctcgccgttctagccgtcttgctcagtccgaccgtacccccatcccagaacccatgcccgaggcaattctaccaatcccagaggcaatccaaccaatcccagaggcaatccaaccaaccccagagccgatcgcaatggcgccggtccccgctattgcgccggagatagaggaagagatgccaccggcgcctccgagtgcggcgattgaagtaaagaccaagtttcccgtggcgcgcatcaagcgcatcatgcaggccgatgaggatgtcggcaaagttgctcaagtgacaccgattgctgtgtgtatgtacgccctttgcgctccccttattaccaatctgccagagatactgactagactcttttgatagccaaggctctcgaactcttcatgatctctcttgtcaccaaggcggcacaagaagcaaaggaccgcaactcaaagcgcgtcacggcctcgcatctcaaacaggccgtcgccaaggatgaagtgcttgacttcttggctgacatcatctccaagatccctgatcaacccgccagtcgcaaacacgaagacgacgggagcgatcaaaatgagggtcgccgtaagcgtggcgggcggcgaccgaaggatgaaagtgattgaggttgacccgtaaatgacttgacgacgtgctagatgggatgggtattaggcgcataacttcatggtggttctttctttcaggcgtttaaatagtgggaggcagatctgggagcgcttttgtctgtgaatatcttttggtttttcgggctccaatgactcgagcctcatacgcgcacggtctttttattcaaacaggacctagacgggcatcttctgttggaacttgaatctgtatgactgtaagtgtaaatctggaatttgcatgtagtactccgcatatgcttggaagttgatagttgatggtgggtgtaaagcggcgatcagcgcgataaacaccgtatccactcatcctcgaccccccgtcactttcactctgtgagatcatgcagtcctcacagaatggactttgtacgtgccccttacttctctatgatcttcactaatagaatatagtggtctcgtcttatcggcggctcgcgcgcgctgtccaacaaatcctccaaggccacctcgcccacggaacggctgactgcatttaagcgcgcctgcaatgccctccaggtaccgacgatgtccgcttccaccaggccaccaattaaccaattgatagcaaatatggcgctcgacaaataccccttcgggcgaacaatcggttacgcatgcgcggatgtacgttgaacgactcaactcgattctgagcgaggaagctcgcggagcggcaccacacccctgtgtggcctatgcggcatcatcccaggtcttcgtgaccgtgaccaagcttgccctttccttccacgatgaaggaattatccgatcagcgacggtattcttcaacacactgatcgatgcagaggtggacggggtcgtggacaaccgattgttcgctcgtgcaatggtggatctggtccgccgcgccgagaagacctccgatgaggctgagggccgactcgtcgaattgctatttggtattgccaacaacattcgtctgcaacctggtatcctgcccgcgtggtttgtgcctcgggtgacacccaacgcccaggatagcgattcccaagccccaagtgggacggagtttgcaggagctacgaggaaggacgagttccctctgttctatctgctggtagactatgttcaccacgaaggacgcgctggggactttgcccgaacggggttgctctacctcattgaaaccgcatcgcggtctaaaaacctagagaaatggctgatcgagagtgacctggctacgctcatggctactggactgggcgcactctacagccagctcggacagtgagttcggttctttgatcattgtgggacaatatactaatcgaataaagcttgtcgtttactcctgccgccgaggacgataaccttcctcacattgttgctctatctgatcatggcaaacaggagaccgctttgcagccaaccctaggtcaaacaatggatgctttcatgtcctatctgttgttttggcaggacacaatcgaccactgcaaatctgccgaagtgaacgacaccttactagaccatttccaggtgctgtttctggagcaacttttgtgagtatacactcgtcaccccagaatggacttatcactgacccttgcaggtacccctctttgctagaatcatcagatgtagctggtggctcgacagcagcggtgctgacctacatgtgccgcattctcgactcaatcgatcaaggcgaattggtccaccgaatcttacatttcttactagcgtctacccctcagcctgaggagcaaatggatatgtccgcaagccgtcgcaaatcactcaatgtgctagctgcgctggcctccgaagcggctcatccctcaccctcactattcaatcttcgcgatttggccctactaggactccagtcatcgaactgccagacggtattagctacactacgccttttaaataccgttctccagagacaccatctattcgcacgggcgctgatccataccattcctactcagcctgcaaatcagcgccccgttggcgccttgaatgccgagctagagcaattagtagtcatgggaacgtccctcgttgatgaccccacgctgaatgagtcgtatgacaactatgtttcagatgcgacatgcgtgcttgaatcccgcctgtgtctgcccatctcttcaatgggggaagacgaggagacgttacctctgccattgcagctccagcaagatgatcccatagtgcaggcccttttcgagtgccttgaaactttctttactaacagtgtcatcgtcaatctggcattgacaggtgtgttcatgagtctggcatcctcacatctcttctccttggacgggtgggtgttggttgatcccaaccaatacggggccccatcctcggaagaaaccgacgacggattggatgttagccgggcctaccaggccccaacttggcctgccacggctgctccgacattgacactagcgctccaaaaactcgtgaaccaggtccgacaatggcaacaagaactccccgacttcgatgtactggtcgctgcccgacgagaactcttgcaccaggatgatcgcccacaaacaccggaccgatcccgagagtcctcagagcatccagcgtcaaccaataattcgcgcccgtcatattcaggttcagccggtgtctctaccccagctgcccgtggccggtctccatacccggtcaattcgccctctatgctttctcatcgggatgcatcatctgtcccttccgagtcgcgcggatccttgaacgcccgagcggtggccgccgaggctcttcgccagcgccttgccacaccgttcccgcctgcacccgcggatccaccgtatccatcgactggggaggaaccctcggactcagaagataccaagcaggctccaatcgcaaccctcggtcatgtactgacgaatgtggtcattctttacgaattcctcctagagttgtcggcggtagtacaagtccgaggaagcctatttgaagaggcaggatatgattttaattaggaaaaggggtgttgatttgtttttctttctttgtatttaaagggggtatacctaagtatcaatatacagtattatttttgtctcttcatgaacaatctatcaaaagaccaatgaggaatttgatatgcaactcagtgaataagaatagcaccagtggacccccgacgacgctgattggccactaagcccctggacgagagactatgaacccgccaagccctcgtgccgggttggcttgcggcgattggcgacttggcctctagacacgtcggacacaatttctcactcctctctaacgcatttctgacaatgatttgatactagccctcatttatacatcccgatcggactaccttcttttatatataccctcattgacggtatgactggccgagatggcctccatacgtcatgagtctcttgaccgtgaggaccgcgaggatgccccattcctcgactcccccgatttaagcaccccgggctcagcccatcgccatgtttctagcaagcccagtataggaagccacccattcaaggccaatgcctctgctagcaccatcacctttcgcctcaaggtgaccctattcgccatggtcctcgcagttgagatcggctttgctttcctggagggccccatggtccgaatcatggagtctattgcttgtcgtcagtatttcttgggtgtggatccgactaagatcggtgcggatggacaagtgcccgaggccatgtgtaagattggcgaggtgcaagctgaactggcggctgtgaagggctaccatatgttctttgatggatcactgagtacgttgattggaatgtttagcgctagactatgatctaattgtttcgcaggcgccctattggcgattccctatggtctgctggcagaccgtcgtggccgcaaatctaccctcgccttgtctcttcccgggtttgggttgaacgccttatttacaatcctcatattgtggttctcggatatatttcccctgcgtgcgctttggtttactgccttgacgtggttgtttgggggtggtccagtcgtgtcgttcgcgattatctggaccatgatggccgatgtaaccaacgagtcggaaaggtatactactcctccatgttgggcgtgagtcttatagatgctgatcaggtggaacagagcggaactcttttttcaatttgccatcgtatcgatgggtgccgacttcgcgtcaagtgctgttagttcttatctgatgaccttgaatccttggataccgttggtggttggattcgcaattgtaatggccggaatgatgctcattttggccctaccggaaacgaagcatgcactgccaccccggaaagctgaaccaactcatgtggagatgtcggatttgacacatgacaccgagccgaaaaattctatacatatccctcgcgtacccgaaccatatcgcgcagaacccgacatgaatggtgatcatgacgacgaaccgccttcttggagtatccaatcatactcgcaccgatctattctggcaaagtttcgcgcaaattaccgcttttaccttagaccctaccgcttcattctcaaccgaaaaccagtgctcctccttctcactgcgttcctagtctaccgcctgagccgaggctcatcttggttcttgacccaatatatatcgacacgttattcatggacactggcacaggccaacttcttggtatctgctcgtccgactgtgtcaatccccctgttcctctttgtcctacctttcctcaaaagacgagtcgtgaatccccgactttcctcaacagaaaaagacctctggctagcgcggcgcagtatattctgtcttactgttggaaccctcggaatcggcctctccccaaccattgcgaccctgatccccagcatgattgtccagacctcaggatcgggcttcgttttccttgcccgctccatcattaccactttggttgaacgtgatgagactgctcgcttgtttactgcgattgagattatccaatcattaggaaatgtggttgcgagtttatccatcaccaccgttttccagattgggctgcgtctcggtggagtttggattggtctcgcgtggatgatgaccagtacgctcttttgtttggtcggggtagccatctggtcttttaatcttcctccaagtcctccgacaccggactttgcggaggattatgacggggatgacagggcgtgaatctatagatcttgtatactactcatagcttccgtgcgcacttagagcgtttgttttttagtatctattatattatatatagcgatgtacgaaaataaccaatcagatagaccaaaactcaatacaagagatctatcgacgtaactcgctcgcctgcgtgagtcttacacgccgggaaaaagtgccgaatgcctcaggcataatatcacgtggcagctcgtctcgcatgtgattatcaccagcttgtcgacccgattccattgtcagaattagcccgagttcgagttgcaacctgtgctgccagcacgctcctaaatatacacttgtttagcgcatggcgtgttgatgattgggcctgtatcactgctcattctgcctaaacttgtcataacacgagatggagagatactcacagtttcgggatcgaggtaaatttgcgctgtgctaaccagcccccaagtccagttatactgacatctctaggctcgggaattgcacccttcctcccgatccccgttgaaccactcggcctccaaacgcctcttcgcattttccttttctgcttccgcctcccgctatttattttcgtcactcttagctattttttgatcctacaatggcttcctatcggatcgctgggcaaaaaggctgctttgtggtgtatacttggagttcccagcatctggtggattgaccttcaagtggacggagtgcgcaaagggttcgtgctgcaccatcgaaactatagcctgttctgctggtaactaaaatatccggcacaggtctttgaaacagcagcaagcacgtctgccccaacccggctctgtcatcgcctcgtccttcacatcacctattgatgccgtgtacctggcggctatcttcgacccgatcttcacagcatcctaccccaacactcgccaggtcgagcgcatctctctgttccaagccatactgcgagccttcgcttcccccgcaacccaaccggcccctggtgccctgatggtggatgtctcaagcttggtcgagaagtaccccaacaggccgattgtattgttcccagagtgtaccaccaccaacggccgtggcatcttgaccttgagcaactcccttctcagcgtacctcccaagaccaagatcttccccgttagtctgcgctatacgcctatggatatcgtgacccccctccctgggagctatatgagcttgctgtggacgcttcttggcaagccgacccactgcatcagagtgcgcatcgcggagtgcatcacaagaagccaaaatgccattgatacggctccctctctggcgactgcgaagtcgacctataatacgaattacctggacacactggaccgggacgggcaagaactggcatcgtccagcgagaaggcgctcctggataatgtgggcgagtcgctcgcccgtcttggtcgggttaagcgggttggcttgggggtgaaagagaagcaggaattttctcgagcttggagtaagagtcgtcggacatggtgatcttgatacatagacagtatttctttcgctatatttagacccaaacacattgtttcactctcgccaatgctgcaggtacatggcgcacatatgcagttcgcgagttgaatctaatttgctagatatagaaataactgtagaggatggatcttgatgaggatgaatatttgacctggcttaggcttggtttctatttaggtacgaatgatatcttcgtcatgtggctcgatgacccgtcgacacgagaccttagcaacttatcttgaacgtgtcaatcgtgctgattggacctgggaatagttggttgtaaattgggccaactcacgaatattgtgtaccctctgtcataggagcaaacgagattgcctcaacgcttgagacagaactagacctacctgatatgggtcctctcgtttgattctgtttgaaccttctctctctgtttctcagctccttactgtcttcctttgatcgatctgcatcatagatctgagggagaaaccaaccatgcttctaaaactattttttttggcagtcgctgcatcggtggctcttgctgcctccagtgaggcattgaaacaatgtctcgagaatgtgttcacagaccgagcaggctttgccttcgctggagatctattctatgaccgtattgtgaatcgctacaaccttaacattcccgttactccatcagcgttggctttccctacgtgagtactcttgaaagaatgatacattgtgttcctcgctcacaacccacagctcttctcaacaggtggctgatatagtcaaatgtgccgcggataacggatatccagtccaggccagaagtggaggacacagctatggcaactacggtgagatcctcaaattacagtagcacagtggaatcccacctgcaggctaacgtgttatacgtgacaggtcttggaggggccgacggcgccgttgcgattgacttgaagcatctccaacaattctccatggacaagacaacttggcaagcgacaattggggcgggaagtttgctgagtgatgtgacacagcgattgtcccacgccggaggacgggctatgtctcacggaatatgtcctcaagtcggttcgggaggacatttcacaattggtggtcttggtccgacctcgcgtcaattcggtgccgcacttgaccatgtactggaggttgaggtggttctggccaactcgagtattgtcagagcctctgacaccgagaataaggacctcttttgggctatcaaaggtgctgcctcgggctacggtatcgtcacggagttcaaggtccgaaccgagcctgagcctggtactgcagtgcagtatgcatacagtatggagtttggcaaccccacgaagcaagcgaccctttttaagagctggcaggccttcgtgtcagatccgaagttgactcgaaagatggcgtctaccctcactatgcttgagaatagtatggcaattagcggcaccttcttcggcaccaaggaagagtatgataagttgaacctaaccaacaagttccctggtgcaaatggcgatgcattggttttcgaggactggttaggtcttgtcgcccactgggctgaagatcttattttagggttggccgctggaatcccaacaaatttttacgcaaagtctacttcttggacacctcagaccctcatcaccccggagaccgtcgacaaaatgttcgattacattgctaccgtcaacaagggtactttaggctggttcctgttattcgatttgcagggaggctacaccaatgacatcccaactaacgctacatcttacgcccatcgtgatgtcctcatctggttacagtcctacacagtcaatttcttgggaccaatctcccaggcccagatcgacttcctcgatgggctcaacaagattgtcaccaataataagctaccctacactgcctacccgggttacgttgatcctcttatgcccaacgcacccgaggcatactggggcaccaatctcccccgactgcagcagatcaaagagctagttgacccaaacgatgtgtttcggaatccacagagcccatcccctgcaaacaaggagcctttgtgacaaagcatcgggtcttttacattcagaactagtcataatcaaatcattttgtaaaagggtttagaaacataagaccagaaatttgatttaataaagaagacatagactagtcatgcgttattccttctcgcttttctgcttcgccgcccactcttcactctgacgagaagtccatttccaacgaagtgcccacatctcttgatacaacttctctgagcaatccgggcacattcctgccttctgaaaaagtcgctcttcgggaattccaagaatgccgatattgagagctcgtagaacaacccccgagcaacgctctcgcatgagaaatggcacgccgaactctttacagcgttcaactcgtccgaaatgaatacaattgcacatcgtccacatgttataagtctggaaacacattttgaggctaattctctgtagctgagtcaatgggagagatacagacccggtatagtatacttaggggttctgttgctttgctcttgaggctggcttgtgattttggtagatggttatatatttgcggaatattcattgatctttgaagacttcgggtctttcggtctcttccttgtttctttaacacgctttgagctggtgagacatcagatcaacaaagacatacatagaacattgtctcaaaagccagaaatgaaaatgatgataggagtattctgtataacaaagtgtgaagttttgggtcattagttagctcaatggtaaatggtagccttttcagatgtcttttccgtatcttctgtgaaaacaactttgctacgtataaccttgaaacactaatattaaataaccaaaaatagcgagtaaacaaatctgccgcgtatgtaaaaatagtaaatgggtattgggtatttcaaaagctgctaatgggaacaaaacctctatacactaagccatgatacatcatgatcgtctggtcaaggcatctctagccaaagcatcaatgcgacgagaatacaagtccatgaaatgcataacgggatcaccaaagaccacacctcggagctcagtgtctacgatcccacaggcatccacattctcccgcggtggcagtgcaggagggccaccagggaccggtggcgctacaaacacaggttggctagtcggttggtctcgcggacgaagtagaacaagccgaccagcgagtgacagatcggacgagggagtcctccaatatataggagcggctttcttcttcttgtcgtacaaggctagtactgaccccggagcgggcgaaacatacagatctagcaatgagatgaagtagttcttgtcggcacgggaaactgggtcaccctcattgataaaagcgaaaaacatggactttgacctctgggcagtaggagagagctgcaagggacgaagcgatatgggtggagcaccaaatgtgacacaatgaatgtgtttgaagcagccgcggagatgaatgagttcggattgcacggctggagactcggataggaggtgtagatatagcaagctggcgacggcaccgcccgcggagtggccagtgaagattagcgaataggacatgcgtgagggatcttcttcaagaagactacgtagccgggcagcgacgggggcaaccatttttcgggccacggataggaagcccgagtgacagcagttggatgggtcgtctagaaatcccatgggaggaactggtgctgcccggacgttcacggcccagtcgaggaaactctgcgtgccacgtatggcgaagacaatcgtgttcatgtcgtcgattgggagcgatttgaccaccatggctttggtgccgtgtagccaatcggagtccacgtatgaatgccgttcatggcctgaaggcttgtcgtaaacccggcgcgagtacttggctgctagctggaggaggggatatgttggaggatagctgaatgcgagatgagcaagttgggctaaatatgaccggagtgtggagggtcttacaatttcagcgttgttaaatgaggcggtaaccgcgaattggcatacagatacaccttcgagaagtaatccacagatcttgttggcttcttcgcttttcgctttgatcgatctttcttctcgtctgactgatgaggaattttacaagcagcaactattgtcacaaatgagtatcattcgataatacaatccgaaccataccacttacttagttcagtttctctcccacaaaacgaccccaggtcgatcgaggtgatgacttgatctaacaaccgcgatgtggcctccttgacgtttgcgccaccacccaaactctggcggaccaaatgttcgagatcaaggattgtcgcattggtcttctcgaacgtatgcgataccaagctggtcattgactggttcaaattcgtacacgatgtccattttgaaagtttcggtgggtgagcgttccaggggggactgcttgaggcaggtgctgggaaaggatagagtggctgaggttgtatacgagccatagacattgccatatttggattatatgccacggtagatgtatgagatgtgttaaatgtatgaaatgtgttgactgaatacgcccccgctggcgacccatacggaggatcgacatatttctgcggtacccctatttccggacgtggtggttttggcggtggtttaggagatgtcggtctctttgagcgactcgaacggccaaaggccatggcgtatatcccaactcagtgtgtgtgaaatgcgtggagtgcctggattcaatatgggctatcctatacgtattctcaagaaccccggtccttgtccctcgcacatcgtacagcgatgtaaagcgaaaaagaaaaaggcaatgcaggagtcatgcaggtccttcatgtcaagcacgcgtaagaagcagggcactcccatcacgcgggttctccgtcgacttctccgctggccgtcgataggctgaaatccgagtacgagcacagccccatccgggccatccagggcgtccacaacaaatacgattggccgcatgggaacaaagcttggcttggcttggattcagcttggattctagagcatatgattgtgtcgagttcttgacgtcatgatatttggagatgtcgaatactaatagcaaggctgaatgtaacaaatatgaaattagaagagacgcgatgggaacaatgacaggccaatgagatccgaaactgtaaaaccatctacgctgaaactgaggaaggacatcggtttagtcgtttgttagtgtttcattcgggcgcacattcccaagagccaatcccacatgatgtatcatgttgctgacctgtcaatggtttagtagttcatttgtcaacggctgggacaggaaccgcagctctgtccggcttctttattgaccgctcggatatggtgatcaacttttcaatcgactaattcggtcacgatatcgtgactatcaccagttcgcatgtctgtagcaagcttcgtatgtgaaggggtatgtgaagggtgatatgggcaagatagggaatgaacagatgggaaacgtgtctttgtatttccatgtcttacctcctggaggtagttgtatgtaaaaaagggtataaaaagccggtctagccataaaaacataaaatccaatccacataatgactcattcagtcatcatgcctcgtgaataataatgatgagtaaaaaaacgacacaagagaaaaggtatgtgagtcaagaaagggaatagaataaagagcatcagaaaggggagaaaaagaatcgaaaggagggccaaaaaaaaaaaaaaaaaaaaaaacggacagcaaggcacattggagaccggctctatggcacttctttgtcgcctcttttcaaaccaccgggtacattgatagcatcacgcacccaatccatagcagcaatctcatcaagggtcttgcgttttgtgttgcgcttgagaagaccttccacacagtcacgggccccttcgagtcctttgcccttttcggggtcccattcctcgtcctcgtcggcatatctataccaagcccattcacaccgtgcgatacgatgcggagtccgggcacgaagtttggcaggatctcctcgagtgccaggcagaacatcgaagggtaaccgattctccatgatggcatagagtagaacaccgagtgcccaggcgtcagtggagcggccgtcgtaagcctggcccatcagaatttcgggggctgcgtagtcttcgcttccacaccgggtctgcaggagcggactctctggtggttcagggatacgtcgagacaggccgagatcactgagggtgacgacggcgcggtcgtaggtacgccagtcttgcacatcatccataacatgagcgggcatggtaagcagaacgtctggaaacatggtcagtataaggtctgcagtatcctggcaaacaacgctgtctcactttctaacttgatgtctcggtgaacgatgtaatgagcatgcagataacgcacagcatcaaccaattcggcaaaaatgcgccggatcaaatccgcggacatacgagctcctgatgtggcaaactcgaacaaatctccaccaggacaatagtccaaaaccaacaaagcacgcttttcatcgctgccgaatgctttcagttggacaagggacggatggttgaccgacttcaagatttctacttcgcgcttgagtgatatttccagtcggccctcatccgcgcctccagcgggtccatgttcgatgattttgactgcgaccagcttctgattgttgacaaacccgtggaatgtgccagctccatcaccatccggcgacaaaggcatcccggggaaaggttccacacgtgctgccaaactgacctgactgaatgtgccctggcccaatgtccggactttctggtagatacgggcctgctctgtacggaccgaccggacggaatagatatcctgagacgcggacagaggggcggggtaacggataacgggttcattgtcactgtatccactgccactgctgcgaggcgggctgggaggacgaacggtcggcaatgcgatacctcggtagacagcgagatattgttcgcgatgaagtccattggacttcgaatctatgctcgacgacggggcgatcccaagcccagtattcccttgcactgcaatcggacggggaggaacagagacccggccgggtggtggtgcatagtcactcagactgcgattccgagaatgagaatgctttgaggacgagtcgcgacgatgccaattattcacgaatgactcttccccttggccatcaattccagtgtatggtttggcgcgcgaacggggcatgacggggggcccaagcatttgtgacgaatcgctcaggcgaagactggagccgttgcgcgacgctatcgacgaagaacgagataacgacggtaaatcacctttccgccacggggaagctcctccaattggcgatggcaatggagttatgtcacccatcgcattcaattgaggcgaggacatgatggatgccggggacaaggaaccactgtatgtaggtggtgcgatgagggcacgaaggctcggggtgcggtttggatagcttccggaaaaactggtcgaagcataaggatcggattctcgcgagctggacggtcgaatactgggtagatcggtgcgaatctgaagagacggcagtggcgaaacgtgattaagtatggaaggtgcgaaggaaggtgcgaggtcgtctaccgaaagagggctgtcaatctcctctttctttgtatgttcattgtcgcttgcatcttgaaacattgttgacatggtcgatagaccggacttgtgtatcattttggaaccgaaaaggtgttgggaggaaggatgacgcggccgcaaacggaaggccgggtgcgttgagttctatcctccgagggtgttttggggggtcggagtcacaaggtataaaacggccaaagataagagtcttggaaccccccaattaagcctccaagcctaaatggccttagcgtagacccgttaagggtcgcctctctactccgtaggtataacggaaggtcagaccgcatgcaagatggattattaagggggaaatgaaggaaagggggaaatgaaggacccaaagtaaatgcaattagaaaaaaagcgccacctgcgcaaggccgggcgatgatgcagcgaaaagaagaaaaaaaaaaaattcaagaaatcacctgggcaggatgaatggggatgctagtcagctgacgatcccaatatggttagttccccatgtgctccccgcagtgtttacttgagtttatactgcaatttcgatttggtaagatgggaataaggagatacggggataggagatggcatatattactttatcttcatatctattgcacactaggagccaattggatcagatccgatctcggtatatatctttaattctgcgttgatacctgtgagccccgaatctgattgctccgagttgtagttcccaaaggggaaggtggtgtgactatcatctgcacttttttgtgacctcggagctcagatatagattatgcctcatacatatcttatccgaagatcattctaccctcctacatattatgccgtacacttcattctctttccttcatacctcaaatatacctcaatattcaacccttgctcttggccctcgggaacgatagcttagcggctggaaccggaatcgcttacctgcatgtaggggccaaacacgtcctgtacgccactggtatagctaattttagcattcgtcgtggcttgcccccgaacccaaaatcgtgaaagaccttgctaaccgtatgacgacacctagtcccattgactgagtaccctttcaagttttcttcttccgacccggtaatatacgaaccaataaccaaatctccattcctgggagctgatgtggccccgatctaacccgttagaacccattctccggataaatcagccgcatgatgttgcttgggccatccatggatctttgcggctactgcgggagaggcgtcgaatggcaaggggtactatctacatgcaattaattggaggcgttatatggcgagatccaaggttggtgggggaagttttcgggtgttagggttatccactcttcttgccatcgtgaccaaggcccactactgcgggattgagagcaaaagacaagaccttccagttccgaacccgtcgatcatcgccgtccacggatgttccgtgctcaattgctggctgcgagtggctgggagaggatcggcacggacccgaccgcggtggggctttatatggtgaattctgtcagaccgaaaatgatgggatatcaactatcaagagcaaaggagtaaatattggctttggagtgtccttctcatttgttagattatctgcaaagtcattatcctttgcacacatcatgctcctcttgagtcggatgtctgcagatgcatcggactagaattctaccccacatgtatcgattgactaggctcgcgccgaagctataagctatcttgaagctcgctcgaattttcctatcagggctttgcacattttgcttcatctagaaaaacgtacaaatccttcatgctagtagtacacggttaggttgtgctcacgttgtgcaggagcatggcgctgtggttggacaggagcagcctctttcataacattggattgatatttattttagagacgcgataagatgaagacataacactattgaggcaagtcttgtattcaatccctcgggatgctgaacgccgaacgccgaacgtcaggaaattaaaaacaaagccccaaagcccaaacccggatgtgacagaatcaaaacaactgataccccccgggcaggggaacttgacagttccttttggcacacatttcccaattcgggacctctaccctctacaagccatttgactcagacctcattattatcttatggagcatggcatctcttccaaacttcgatgaccttcctcctgtcgaggggatgccgcaaggctgtgcatggggcatcttcgacaaagacgacgagaaagatgttctcggcaccctgaatctactcactccagaagtcgtcaaggatgctgtcacggaggtacgccaaggcgtgtctatttccttaaagtgaaatgcccttcataatctccagaatacgacctaataccactagttggcccatcgggagcatcaaaatcccagggttctttcgaaaaagcttctgtcacaatgtcatgaagttgaaagacgcagcatctggcagccactttggatttgacgacgaggtattgtgctgccaggttgttctctctcataccagagctaattaatcctaggtcgaatttaacacccaagccagtagtcaatgggatagtttctgtgagtccaagaactttagattcttgaattcaaaagagaactgactcgcaacccagctcacttcatgcacctcccaaccggcctcacctacaacggagcgaaaccaacaatcgatgcatttcagactcccgaatctgccccagatcttccaacactagaccgtaagcaaaaatccaaccaatttcaacatcaacactgaaaaaggctaatggaggacaccagactggcaccaacgcggctgtgtgacaggccgaggcgtactaatcgacttcaagagttacgcgcagacgcacgcgataaactacgaccaattctccggcttccgcatcgggaccacagagctagaagcagtggctacctggcaggggataaccttcaaagcaggagatatcctccttatccgattcggggtaacagagacgctgggtcagatgaccggtgccgagcagggcgctgcgatgagcagcggcaagatgtgtgggctggaggggagtaaggaaatggcgcgttggctttgggatcggcatttcgctgctgttgctagtgataacacggcggttgaggctatgccgcctatcatcgatggtgttgagcagcctacccatgagcttgtgttgcatcagtggtgtcttagtttgctgggtattccgctcggtgagctttgggatctgaaagcgttggctcatgcctgtagggctagtagacagtattctttcttgcttacttcgtccccgctgaatttccctggtgctgtcgccagtcctcctaacgcactggccatactgtgaagaggacatgttttactatgtaccaacggtctcggtggatcacagtgattagacacaaatgaaattcccggtacttttatttgtggagatctaaatcgaagttctgtagccgttcatctggggaaatggttcgagtacccactttgggctccacatggcttagcctcttgttctgtgggccccgagtatttatagatgtaacatgccgaggtcaatatattggagcatggacggttaaaatcttaagaagagccagccctagtgtaatggactatagcacgttgggatatgtatgtttatatacacattcaaacaagcatgaagtcaaaatcagcttctcttgcaatatcctgccactgtatatcaacgtgcggtccagccactgcccgccgattccacagagcttgaacgatttcacataatatattgatactctggatgccgtgccgactcttccggtgaaagaatgccaacattcgatcttgcagatcaggccggtcgcagtcagccgcaaccacaaaacttgcccagttataggaacagccacccttgtcgcgcgtgagcgcatcgacagattcaagctcgtgtatgcctttctcaatcagatcctgtacgtcgcacaatggtgcgccacgcaaactgcggcggaagtatacaatcgtcgcatagtagaatgagttcaaagcgtgttggacaatgaccgaaccgggggcgtctgggttggacaaggacgggaagttcaagtagagctggagttggagccggtcgagttcttcggtggaaagctgtgtctgggactcaacaagtgtggtgatttgagcgaggcattggaccagtggtattgtgactccatgcgattgttctaggtagtgatgtaaatgggaggggccattgaggagcgacatgagctggtcaggtataggaagactgcatagtgaggaaagggacaagtagcttttaaccaatctagcagcagtcggagtacggatccaatcgccatggacctcgttctccaggaggccaaggcatccagaaacgtgtgctctccatcggctgcggcgaccagacatagcttcagcggagatgcaggtaagcacagcggctaaagtgggctcatctaggcagctagcctgttgtaggcttcctcgcaaatgacccagagctagctggtcatggtggacggcgatggaatggtaccgcgaatcatgccggaggtgagaaagactaaaagcagaggaggcacagatagcgtggaagattgagagatggatgttcgattctgctggggaggcatcaaggcctttcaaagccagaggcaagaacactgcccggcagggattgtccggggtgtcaattaagagcatgtttccgctgagaaaaacaacccagtgatggactagctctgtctctggtcttgggagaaccaatggactcaaggaatcccagggggatatcacagtccgattgttgtagatatttgatattggtctgccgtagtcgctcggttctgacggcatatttctggggcttttgtggtgaacataggcgacttcattgatagacatatcaccgaccagatcattaggccttgatgataccgtgcataagtccttgtgggattcaaacataaacggcgcggtagtagatgatgagccggcccacgtgggcttcggtgaagccaactcgctacctctgtcgccatctgctaagtcgaccaagtccgagatatgctgtgaaacctccgtttcttggtctaaaagtgaaacttccaagttaggtagatcaacacaggttgaatcttgagtctctaggcttgacaaagagaacaccgagaacggtcctcgttgttgggcacagccatgccctgaacatccatctaactcaaccagtagttccgtaacagcggcagatgacaacccttggtccgcatctgataatggggctcgcaattggcgccgatgagagcgactcccgggggcttgagaccatcctaggcgcaaaccataccctttgcacacccaaccactccgctggcagcgcccacagtgagggtattcttcgtcgcacttcactcggcggtctcgacaagtccagcatccagtgaaagtcttggtgcgtggttttgggactcttgcattatttgacgatatatccggcattgccaaggatctgggaagggtgaaagctctggcccgggcaacccatttgcccgcacgtcggcaatcgccggtccctgatccacgccgcggatgtttgccaccgccgggtggtattgcgccagcaaataaactaggtttaggagtatttcgttggctccgaaggttagtatttctacaaatgagttatatattgagctatagcctgcttttttgcggcatcgctctccaaggttaccgaatattctttcatctcgcagctaaaatgtgagtagaaatgtgaactccactcattagaaatcaggaagtgtgagaatttgtctattggaagtcactagcagcattagaatacgtaactgacgacacttgcaagcgtcatagccaatgaatcgcaggtatgcaagagacttttctatgtacacagaagaaatacaaagtacaaacccagttgcacatcccattcccaacccacgcataaatgcgaaacatgaagctcgaagcgccggagtgaggagacccgcaggggaaataaaaaaaaaatagttgtaatacatcgcaggcggaaagacaaggcgaggcggctaatagtcaaccgccaatgtcgtttaagggtagcgtggagggtatggagtatcggataaccgagaagcggagtagggtaaaactggccaagctagcaatctagaagaaggcccttcgggtcacctgtaggatcgaggttagcaaaagtcagacagcatatcacagcaatatacatacagcccaggcaccagcaatggtagccacaatgccgccagagatcatcattggcttaagtccacgcgtgctcttgaagaccatgccgctcaatgcgccggccacgatgctgttagtcgcgtcatgcttgcctcgcacatatccgaggctggagttgaatccgttgtaaaccatagctacaacaccagccgagtttccgaggaacggaccgcgacgggtaacggagttgagtacaccgttgagtcgaattttgggtgctgccgtgggtggtgtctttttcaatccttctacaagtccccacgcgcctccagtagcgagtgcaacgagataggtagtaccggcaccataacaaaggtcatctgaccatccacgggatggcaacactgatcgggagccggggagttcgtcaagggcagtgtcatcgagggagaggtagtcgagggtatcctggttcaaaccagccagaggatggaggcgagagggatcgggaatagcgacctcggagaggaaggatgtggcatcttgcgcggttgaagggtcgaaggcctcgggcccggtttgcttgcggccgctgagggagtcccagatggacattgtgaaaagaagtatagaaaaataaaggatagaagataaaattacaagaacctaaggagaaccttggaaggcagggacggatgactggaaaagaagtgatgaccctgtgctcgcagctccactggcatcggaacagcaaaaacttcggtcccgtgacttccggcgatctacggagaagaatttggccgagggatagacgcttaacccgattcggaatcccacatttatcacttggcggcctgaggcatcgcggggagcataaatctctaaaaattaaacgtcggggagatctttttcgcgtaaaccgttatccaagataccgaggcttgtgtgattggaactctgactgttggtgattcacgtcaggtgcaatgtgtcgtatcaaaatggacgaccttgcgcagattgtgcagttgttctcggaaaaaaccctccgagatatcgccaaaggcccattggtgaaattcacactgacatgccaagacaccgagtaagtgaagtatatgttcaatccataataactaatttgttctaatatttccacaagaaaggtgaaccgggtatggcggtctttggttctgacgctatcgacagcatctatctcgcaacctcattcagcagaggcatgcaatgctgcctctgcttttattgatgctgccaccaagtcacaatgtgacgcgactcaacggttgattttctcacaagaagcatggctgtcaatattcgatatttgtttgactcgatatgaagatgcaaagccaaagcctgttaagaaactcctcgcctcggttattgctatcctagtcaaaaatcaccaaggaacaacgagagcagcccttcaaaccgcagtcattgatgccataattcctagcattgtgcttggggagcctcaatcacgcctgaaggggtgtctggtatttttggagacattcatcagaagggatgccctgttacccagcgagtttatcccattgactcgccagtggctgttaaagaatacagataaatgggcaaatctcttcgccaacgatcatgaaactctctccctaggcgaagcgggccccgcttttgacattgcatctggcagcctgcccgatgaactggcaacgaggatctttgttctgggactcttgatccaaaccaacaataggaccatggccgtatcagctggtaacttactggcaattttgatccagaagatgaagcctgaaacctcaccggaaaagctgtcagcgatgtgggtactcccagtgagacgcatggtcttacaaaacatagaaaccttggaagatctgtcaaataggctcctgcagcctttgtttaccatcgaccccaatggcttcaggatcttccttgacacacttccagtcaagagccttctcaaaggtgatatgactgatgcgcctgaggcagagtatatggttcttttcgctgctctgcagatcggcaagaaaaccaacctggttcatgaagattgtgagtggcattgttgacctattattattggtgactggctaatatgcgcagatatttttaacgttggcaaaatgaaactcgacgaaaatgaggtgttagtcctgaagagcgacgtgatcggcaactttctcctgcaccgcgaggccaatatccgtatagcagctctctcgctgttgatcacggcattttccacagtaaagccatttactgttggggcaacgaacgttatccttcgaggactaccctcgatgcatgctgaatccgacgcatatactcgcggagaaattctgagtctgacacgaaaattctttgttcgtctaagaggtggcattgttaaagatgaagacgttgtttcacagacagacaaaacagccaacaagccaggtcaaggccaggtcagaaatgaaactgaaaccatagagttcctaaaggcatacctaaagctattgggtaatgatttgcgtcttgcggcctcatattcgcgccacataacggcgctcaaagctctgaagcttctgctggactccggtcttgatccacgtttagaggtcaagcttcaaaaatcagagatggaaaatctttggaaagttcatatcgaagtgtttgatgcccacctacttcggttgttgattgatctcctgctagatccatttgaagaagttcgacaaacttcgctttcgatcttgattctgtgccctcgagagattctgctcaacggcttgcacaacaagacagaccaacagtccactgcgggcatgcggttgacagatgcaattacccgagcggaaagccttgcaagtaacacgagccgagctgatcacgctgatactgttgctcgtctctatcatatcgtcttttgcgcagccctgccagccaactccggtcaaccggtttctgattggtggacaactaaggcatcagtagttgacacaattttaagaaagcttgaggaacgtctacttgattcaaagacccttttcagctcaactatgcgcgaggcaccacttcatggatatacgtctggtcttaggtatgttgtcccggtccgtatatgtgataaaattctaattgcaattccaggtatattgttcttatgccaagcttccactctctgatatctgatgactcgggatccgctgcttggcggtctgtccatgaccgtattgttgcaatttgcgataagatctggattgaggcgaagcctttgctgtgtatcgattcacccgaaggtcactcggacgagcctaccgaggacctgaatgtgggacccaaggacgccctttcttattcctggagatctcttcgcgaagcaaggtaagttcaaatcttttttgactatgcatgatcgctgactggagcagcctcttgcttcatgccaccatggtaaacatcagttacggaccaagcggcaacgatggactcaatatggcggatttcgcaaacattggaggcgtgagcttcacacagttggctgaacttcgccatagaggtgcattttccaacgtttcacagacatttgcgacatgctgtcaacgatgcagctcctcgaaggatccggcaatccgagaacttccgagaacctggtaccaggaagctaagtcgactatctttggctcggcatctgaactcacccgtcggtctgctggcttgcctgcactggtgactggaatcgttggttccgatcccgggactcccttcttcaatgaggctattaacgagctccacgagatctcatcccttcccgttgagtacgacaaagagagacagtacttagaactgccccaggttcatgcaatgaattgcctgaaagatatcttcaccaacgcgaagcttggctcccataccgagccattcattatgaaagcactgacgctgtccgccgaacgccttgggtctccaatctgggcccttcgcaattcgggactgatgctcttccgtgccctactcacaaaaatgtgccgggccattcccggcgctgggcctggttttggaggaaactcgggctcagagccaggatcccggataacattccccaagtaccctggtctacttgaactgctctctggccttctcacaacgacgcagggcgaagcagcagaggggactgatattattaccgagcgggtgttccctgcgctagaactcgttggggacaaagtccctagcttgaatgatcctattgatgagatgctacgcgggttggttctggagcacctgaacagcccagtttggggtgttagagagcatgcagcccgtgtatatgcgtcgttgttaacccgacaaaatatcccggaagatttatgcactcttgtcaagagtccctcaaaaatcaccgagaattatgttcacggtgttgctttgtgtgtgcgatatgcccttcgtcgatactccttcaccaccgatgatttctggaaatgtgagtccgctgaacaattcctgataagactgtagttaatcatttgacagccaaccttgatgtacttttcacgaccttgcgcactgtattagaatatctgttccgtgttggaaaatcgccaactgtggcaggcgagcttgttgaaattctcaatggcacgttggagcgggcgatacaagcccataacgaaagtgaggatattcacctgagtaaagaaaatatacgtgctaacagatctatagaccaagttatctcttttatcaacgagatattccaggttcacgaactcgatgagattttgagatttgtttttgacgcttctcagacaggatggaacatctcaagcactagccgagcatctgccttacttagaagagcgcttgcttggtgcacaacattgaaaatgcttacttcccagcagtgggaacatctcccagcattcatcattggagtatcgcaattcgatgcagatgtcgctcgttggatattagagcagctccacgaattagttggcgaagaagacaggtacagacagccattggctgacttgtattcgtctgtcattttgggaggtagtcgacctgatgtgaaaacaatggccgcatccaatttggcttctatcgaggagaacttgttatcatcactgtccgactttgtgccaagcatcggtatcccatgggatgctattgcaatgagcttccgccctgaaacagatatcacaagatggaaccgagaggcaacagacgccgagctccgacttcgaggctgtatactggccacccggctatctgttgatcaagcagctttgtcctcatctgaaggcgatatccacagctggactatcaagcttcgctctgccttgagcgaggagacagtgagttttatcgagaaatttggcatacaatcgagtcactgatctaatctttttcgtttcctaggaattcacaacccgttttgctgcagccatatccgttggcagcttttcacgggctcttagataccccggttcccagccacgtgtggattcggtgctactagatgtctatctggtcttgtatgacatgcttaatgatgacgatgacgaaattcgcgatgtggctgcgtcaagtgcctcttggattctgtcacactcgtcagtttcacctgacgccgacgtggccctggcgcctcttaatgcaagtgccctgcttgccgacttcattatcgataactattcagattccgcacgcctcgggcagcgggttcttcgatatttgactggccaagagccaaggatcagtggatctgatgaacgcaatcacccagttgccgtgtcagaccagatcacagagtatcgccaagagagcaccgtcctcttcgtggaggagaaacagaatctgtttatcgatgatgtgcgtgaggttgagatttggtcgcgagctctgttgcggttgactccctcggcatacgctaagctttcgttggatgaaatttctgcctggacctttgagggattaaattatctctgctctcttgttggtgacgaaaaagagccagatggacttcttggttgggtctcgaagcccgagatcttcaccttaggtctccgagttattatcatctcgtctgctctagcctcacaagtcttcacagcaccagagagtctgcaagtgcagccggctgccttccggggatcactcaaatccctcttggacgcaggcaagttgtcatcagtccatggggattggttgtcaaggatccagactgcattggaaatgtgagatgtaatgtgcattaaaagtgaaaccaggataactagttacatatacgttggatagaagatcaaaaaatatctcgtttgccatgtttgcgagtctgttttctctgctccttcctcatttcctcttaccttcttcacttgatgtcgatatcctatttaagacctccaatcaatcctcccactctccaccctcttcattctcctctttttgtttcattctatgcccattcatccttatctgacgtacaccacacaaatccattcccagcactgcagctgcacgcactccaaacccgtcacttcgagtcactctttcgctactgagttgcaccatgaaggacaatattctggtcgcagtttttctggcgatagcgttggtcaccccggccttcgcgtggttgttctacgtttggtatcggtcacccttggcccaactgcaccaagaaggccgaatcatcaacagaaggaaccaagatcgcgcccaggccaactatgagcccgcgaacggagaccaaaatgccatatttggaccctactttacccctcgcggatgggttcgaccaaaggcccgaagactatcccatgtcccgccacagtacgttaacccacggcagccgagcggtaacccgaatcctgaccaacctttccaaggacaaacccaagcgagcacgcatagtcctcagatggcgaaccaccagccgaacccgttatctaaacggcagcaaagaaagcaacgagcgttacaaaacaaacaaaggcagcaacaggaaagacagcagcggcaaggccaagatgagcaacagaacaagcagaaccaacaaagccagccgaaacagaaatacaagaaccaaggccagaaccaccagaagcctcacagtgctcattcccccaatgcccaggagggccacgacgagcagaatcatgaatggggagacacagaagcacaaaatgaccaaaccaacaaccatggtggtggggatggatggggagatgatgacggcacgcgggacaatcagcacaatactgggcagaacgaggacaacaacgattggggtaacgatatcaacaatgaccaaggagatctggtaaataatggatcacattctccacgacgagacaatcacaatagcccaagggaaaagagccctcagtgggataacgaacattacgatgaccacagacacaacaatggaacacgagaaagcaatgaagagcaacaccatcacaatggatggtccaacgaccgccctgcttctccacatcaagcgtcaagaaatgaagcggatccgcccggtggttggggtcaggatgacaatggtgcacagcagaacagccatccacgaagcaactattccaacgaagaccgtaaccgccacggtgaatggggaaatgatgatgcaaaaatttacaagaaaggcaaagacaactaccgtgcatcttcggaacgaaggtcaagagaccagtcaagccccaaccgtgactggggacaaaatgaccatgaaaaatggggtaactccaggggacatgaagaagaataccatggcggtggcagctcagcccggagccaaggtcacaatgtagacagagacaagaagaagaaaaaagaacgctgggtgattgaattggaggagaatgagaagaggcagcgtcgtagtcaaaaccgcgaacgctcggatgcagcatgggaaaatcgaagccaggcttccggctggaaagagaaacaggaatggtgaattcaagttgattatttcgtgtggattggggtggggagttttccagatttctggatttgcgttcatgatagtcgatatttcttttctacaacctgtgtcatgccaaaaatctatatctcatagctaaatctcttaagacttctatacatttgattctcaaacacattgctcgtatatccatagctatactaatgaaactgaatcgaatgaggatgggatgttcactacattacaggccaagacttggggctacccaagtcctaacaaagaacctcgagttcttcatattccgcaccagccaatcctctcttgccctaagattaggaattcatagtgatagggttttaggtctatcaatcgagtaggagttgaagctggaggagctgtgattgatttctgagcgatatcctacgctggaaaaagcccggcttatagaccaagaaagaccaaaagagctagctatatatgttgttctccggtagaggccgcaaacgcgagcgacctcattgttcacctagatcgagagccccattagactagatgcgttagaaaacccagttcttgcataaattagagtcttggcgttcacaaacctgcaaaatcagcagaattgtgcacacaattagcgtgtttgtatagtttataaccgttttactgcaacgttggagcttattttcttcggagaatgtattaagattgtatccgctttggcagaaatatatgtattttggtaaggtaagtcacaaactgcaaacataaacgatcaaatataccgagagcaaaaagttgtatatcccaggacctgacgccacagaatgcagacaaggaacttttaaacagaacgggtgatgtgtataagcaatataatcgcgagaggtgaataaaaacaaatctatcagcgcgaaacagacgacgaggcgactgtgtcaggtatgttggcgagaaagaaacacgaaaatgtgcagaattcgatcccattctcgaaagaaaggggatgcggtggggtttgggcgagactatcccggaggtctataggtgtcgagggtagataagggaaattaatgacgatcaggcttgagcgataggccatccgtcgacatatttgagaggattaaatcccaggaaggcgtcctatgattgtatgtgttagatcaaatcttgatgacgtttgtgcaaggggtaacagaggaggatcgacaggggtgcatgaaccacgacaatcgtggcccacaagtctgccaatattcaagtgtgagctcacctggaatgcaatgccaacggtcgtgttcactgcgatgaggtcagtatggagttcaaaaattgtatttgagtctaatttgagtctaggggtaaacgaacagtagtggtagtagagcacatcggtatcgccgtcacggatcacagcttgcccgcctggggcataggtctctctgttcgagccgtagacaagttcgccgccgcccttgacgagatctgtaccgttcttgtctgtgaatggcccacggggactttgagagcgtccaacgcggatggaatatctgaagtacgtgagtatagagcaacaagtcactagatagcgaagacttactcttgaccagcggccggtaggttgtcttgcttcagattacagcagaaaccatggctaaaccagagatagtaccatccatcgttgtaggagataaaagcaccctcaataggatggggaccggttgggtcaccacagatgttattggccatgcgattcggcggggcgagggattctggttcccacgccagctgacggtcatcgggttcagtagtgctcgctggagagagaaggtccttgctcagcggaatttggaaaattccattccagtagcttccatatgtcaaataagcatgtccatcgggagtgaccaatgtgctagggtcaatggcattggacttagtgtacggagaaatttccgatccattgcccgtgccagtctgaatgacaatgccgtgatcataccagttgcccgggccaggagagttagaggtagccacgccaacagcactgtcgcggcaaccagccttgctaacactgtaatagcaatagtatgtgtcgtcgacaacgataacggtcggggcccagggtgcggcacgatcaccctttgggattacactcttggcatccagcacactgccaacgcgcttccacgggccagccaggctaggcgcagtgtcgatgaggatgtgttcgccaacatgataaagataatactcatcgcccacacggacaatagtaggatcatgtgtatgttgctgtgtctgacgaggagggggaaagcggcttatagcctggtcacttccgagatcttgtgacttctggtcatgctcaaagttctggtctcttcgattgatacccaaaccaagaccaacggagaagaaacatactaaggcgagaaagagaagcatcttaatccagcgtcgagggaattgcttccaaaaagactgatgtcgaaatccatcgcgatggccagacggcgacatcgaccgtgataagtgaccggccctgacgatcatcttgatggaaccaggtacacatcgttttcagtcgacgcacggcgttgccaccctagtagggtggagttgatgatgcagggcagcagggcagaggggtgaaggagctgcgacacggtccactggttactcaatagaggcccacaattggacatgcctgcagggtttcggaatgccgaggtaataagttgttctgtatattgcaggagatacagatgggttattcgccttggcgtgatggaagcggaagggatgggaaggcctcgtggcacaaaagatggatcactgttagaccaactacatatcaggcgattgaactccgagatagtcgtacaccgtaactttgtacataaattagtgaagtcggcaagcaagggaggtacctgacttttgaaatcaatcggttgcagtgtcgatcttccagatgtccttttcaagtcacgggaagtgattggtcaacatgttcggaatgcgccttttgccttttaaacatatcgctcttctccaaggaggatgaaaacggatataaatccatctaggagcaagcccttttctcgtttgacacctttctaacaatatcatcctgtagggttgcaggtacgagggcacgggtaagacagagccttgtccttgtccgtctagggctactactttctatacagaatagcctagactcaagagaatcggagttaaaagaattggatataccaaatttgttccagcgaggtgagtagtgacaagtagtaaaaagtagtaaaaaagtaaaagatatccgccgaacgccagcgccgagctccatcagactaaagatggagtatagtcttctatcgagccacgatcttgtccacctcatctctagcttcggtccatgtctccaggttcttgcgagcccagtccaagtgacaacgagcatatgcgacctagaaacccaagtttagtcttagttttcaggtatgttagggggccaatcataccatgtaccgtcgcaggtcagcttctttgtccttctggaagcgcttgagatcattcagcacacccgcgctcgcatccttgacgtccttttcggacacttctaacgcttgctccaactaaaaatcgagattagctttgaaaccatctgaaatttttactccgtggcccacatacctgaatcaaactttctttcgtctttccaatctggtcccgacgtgttcgttcgggatctacatcagcaaatccgtggatggcatggctgatgcgaccgaaaattttattcgccacaaatgtcccgctggatgtcttgcgatgaccgtgtactgacgggtccgatctcttgagtcctccaatctgcgatccaggcagagagcttatagaatcggtgtgagtagattggaggccagagtcggctgacattatggggccgctgcctccttcgctggcggatgaagttgacagagaacgaggcttcgtcgttccagaatgagggttggtgcgattgagatactgctcgatacgcttggcttctagttcactgcgctcaagggagtctagtaaagtttttttcttcgacaactcatcgcgagtcatttcttgttgtacccgcttgagcactctgtatcgtagaactccgcgaaccacactagcaaattgagcactctcccgcataggttccgcaaaacttgcgctcagagccgaggatagctcttcggtttcaatatacgaagtatctgcagcctggccgatgcgctcaatggcggcagctactgttggtgactgttcagaaagagagaatccgttgtaacgcgctcccaactccatgaggtcggctgagagtccagacaaatgcgagagagttcgtcgattaactttctcaatgttgccctgcaaaagtagttctagctcacgtgtagaagcttcaaaattaataaagtaagggtccagttcttgctcgctaagctttcgagactcaggagggaaccgcccaagcatctcaggtcccgggaatgagggctgctcttgctcattcggtgacgtaggcgatgctggatttgcgctcgctgtagtaatgccaccgctggtcttgagctttgcggatgcagagggaaccgggagccagccatgggctggtgtgggatttgcggggtcaagaggtggcgctttgaggttattctttgggacagatgatgcaggatgggagctcaaaacctcactctgggcaaaagttagctaataaactcgtcgccaggagcctcccggtcaaacctacccagctaacgttgggatctaggaatctccaccacactccatcctcacggatctccttcatacaccgacagcggttgagaaacacaccgagcatgcgctttcggagatctataatggccatatcatctttagccctggtaggtttagctgcgtagtccgccatgctgtgcttctcgggaattggcggaacaaccaaggtgggatgcaaattgacaagcgtttgtcgcaatgatgcaaactcggaatatcgacggcgcacttccaggtcctatcaacacttagcattgtacagttccccgccaggcaccattatcataccgcagtccgaatcgtgtaaacaataaagcctccgcctccctcatggtttttcccggcatctgtgatcaagattggcatatcggggttttcataaaggatctgttcaatgcggctgtcatagacgctcttccgggggtattgttcactggcggcaccatactcggcctcatcttcgggatcgctgagatcgtcggtatgggtgatgtaatcgggaggctcgccgttggagtcgcgactagacggaggggatgagtcgtgttcgtagagagctggctgctgtgagatactgatccaaaggcagaagcgttagggtgcgaaccgagcggagacttacgaggagagagtgcggctgaatgtaaagagtcagataggccggactgatgttggtcaaaggccccgtagggattgttatcttcgtcgttccacattatgagggtatggacgctggataagaccaactagcaccgcaaactgagttggagaagctgtgcctgggagatctgcgggggggaagtcgtggtgtggctggtgcagggcggtgttcgcgattacgtcatgaaggaggcttgaactccaatcttcatcgatggaatatgggcaagagactgtaaaatgggacagccgatgaaaacttgaaagtgtttggtagatgtcttgtgtcctaggatctaatggttgcgatgattccagcttgaacccccgctggtccaaaagcggtcgatgtatatatatccatggatcggtaggctctaaagcaggacatgaaatattaccgagccagtcaagcttaaccaatatatcccccaaacaagattggaagggagttactctacacaaaaaggacttcgaaattaacatcaggtcagagcaatatgctaataaaaaggtgatttatgctgaagggtgcatgtatggcaacaggctcgaagtaaagaggtaacaaatagttctagaaccgatttccatatctcaaaagcctcagatgttgtcccgccgtgtcctgaacaagcatcaaagtccataaagttttctcgtgcagtggaatgactcccatatctcatatctcaatgtttctgcgcccagtgtcttacgtctgatcggcaccctgaaagcctgcagcatcgtgtgcatttcgtcccacctgctctgtattgtgcatagttaataaagccgggttgattccagcaactgagctttgagtgcgttgtagaattgggagaggtggcagcgttggagactggggaggttgcggagcagagagcgagaaaatccagctattggccttgtcgacgaaggaagtagggttgtggccaaagtcaaatccttctctcaaaccatgatccccactggcggtgagtgaatgatttccataatggggttgcggctcctgggagctagccagagtaatgttgggttggttctggcggcgttgacgtaggttccgagtgaactcgttgtgagaagaggtactgtcggaagtgagagtgacagaaccaagttcgccaacctcgaggcggcgttcaactgggtggtccaaagtgtcactactaagccctagcgcaaagctgggagaagtggtacgggcgaggccgattccatcatgaggatttgcagcggatgagttgcggcgagctggaatatcgggaaactgcaagcttggaccgatgtcaagcacactaatctcactttcgctcaggactgaagcacgggttcgcatcgagtttgggacggtaggacccggctgtccattggaactcgagctttgagtcggggcgggggtcgcgtacggaggcatctcatttcctagaatagaatttggtctctgggacttcaataacttgagacgcaagacctcgagcctcagaatatcgagttggtcgccggcactttggtgatccaagtgtctatcagcgttgtcggcgttgatattttcaatcagcgacctggaactggcagcactgaagttgatagcctctggacataagatagatacgttgggattgagctcgaatggctcatggctggagaatccctgaggcttcggagaaggcgcattgcgtttcatttcgggatgagtgcgtggatttacggaggttgggtgattgaagtgagagaagcgtggcaatttggagaccatttgcgtggaggtgattattagcacgcaccttgccctaatacggaaggagggactgtagggctggcactttccttacaaagagccttggctacatgacttcctattctgtacagatctatgtacacatcatgcacatcatctgctcataccgtatgtctgtatgcattgcttccgacatggagtccataaacggagatgtctaaatccctgagtgactttaaatgccatatattccgataggtaaatcaatgcaggacattttaaagcacaaatatattttgcagttgccataaatattagtactatgagtgcttgccaatctcactagctgcacaagccctcttgtacagcctatggaatttcactccacggaatcaaacactttctgttgactggaaaccgctagcacatatataatgcatatagctataagaccagagtcttgtctagtacagcatatatgctgataatgcaggaagaattggacaaattatatataagagtctagcactgaaacactgcccgtgaagcaagttataccaatcccgaaacaaatatgtctgcatttatgatccacttaagcctcttggaactgtcgtttgatagtaaactgatcgtgttctaggtagataacaatgggagaacagagaacaaagaacaaaaccatcaaacttcacagaccgagcgaggtcaccttatatggacacacattgctagcaccccttgtcgacaagactaagtgtagagtcaaagtgtggacaaatttgattccgtccgacctacgataaaggaagcaaggccatagtaggcctacgccttgtatgtaacgattgtatgtagcgatgaatctgatactcaagtgatgaacttcatctacaatttcgctatatctttacgttgacctgaatttggcctcactcttactttgctttgagaagatgattgaaaaaactaaaacaagaaacatgatttttattttgtatgggccacctgcccatcccccttctatgtagagaaacatcccccccccccccccccccccccccccccccctcttttttnnnnnnnnnnnnnnnnnnnnnnnnnnnnnnnnnnnnnnnnnnnnnnnnnnnnnnnnnnnnnnnnnnnnnnnnnnnnnnnnnnnnnnnnnnnnnnnnnnnnnnnnnnnnnnnnnnnnnnnnnnnnnnnnnnnnnnnnnnnnnnnnnnnnnnnnnnnnnnnnnnnnnnnnnnnnnnnnnnnnnnnnnnnnnnnnnnnnnnnnnnnnnnnnnnnnnnnnnctcccccctccgcccctcgtccccttttgtttttttttttgtttttcttttcttttttcatatcattcatgggtccaaggacatgatgtcctcggaccccacacgcagttccatgactgggagatcatcggaggaatcctccccctcacccccagaagtgagaccaaactgaaactgagggtcgatgcccatgccatcaccccatgggcatcgaccctcaaagacgccatcctcggtggcagaattaccaccggcaatctgtgagatgtcgtgagcggcgtcgaacgaccaagagggttccgtgagcttgctgagggagtcgacctgcgatcctccgttctcgtgctcaaagccgtttttcttaccttcgctacccccgtcctccgagcccgaagtactctcctcgacagaagagtacagatcattgccgagggaatcctgcccccggctcacacggggtgccactcctgccctggccaaggcagacgacaccttgcggggtgcgctgccaatggcacgaccgccgtcctccgaaggtgattgggacccaccagggctgcgggaaccggaggaactgccagacacgctccccgcgcggttccggtagccttcgactaggtcccgcagctcctggttaccaaatgcacggtcggagcgacggcggtagaacaggagataggcacccgatgtgatgatcgactgcatgttggtgacagtagtcgcagaggtatctgaaatgaatgtcagtaagatatctcccaattagcatatggagggggcatcgaaccgttgcaatagacccaggcaccggaaacaaagtccttgatgtaggcagtgtagtggccactacccattccacccatgtggttgtcgacagcaatcaaatcgtacaccgcactttttccattcgcggggccttccacgcggctgctcaagtctagtccctcgaaggggaagtcgataagagtgctgatcttgtgtccgtgcctgccacggaattggctaaatcgcttgagctggatgaccataatatccgggattctccacagctcaaacttcttggtggccgaaacgtgagttttgcactgaggacaaaaccagctatctgcgcgagaaagaatttcctccttgctgaactcgtccaggcattggtcgagagagacatttgtttgcttcggtttcttctggcttaccgccatggtatgatcatagacattcttgatgctcatgtaggtagggcagccacggagctcctcgggatcacgtagcttgccgccgaaaagggcatcaaatgcatcaggagtccagtcaaggagaatggcatcgccttggtgaaggaggggtagtgctgagtttggtgtgacatctgattcatctgtatcaacgtcatcttcggcattgtcatctgcggagcttttagataaagcatcggatccctggcaaatattagcgggttgattatgaatggacaagatggaataaacaaccttagtagaagtgggaggagatgggatgcgagaggaaatagaagggtattttttcagggtggagatgttgcgtccatcaggcaaagtggcatttgtgctcatgactgtcgcatcgaaaagtgacaacaaactggcaggaatcttgccagcaagaggatgccgaggggattcgacagattcagagtcagaatccgactcatcggagctctctgcaggcttaggcgcttgctcagcttgcatagaaatgtcgacgatgctgtcttcgccgtcaacagaagaagttttgattcgggaatctgctgatcgtgcatcatcctcgtttgtgaccacggtgtcagagtcatcagctgcattgtcatcggtcgttttttcttcgacggccagaatgtcgtgtgtagtcagattattggcttgggtcaagagcttgcggtaaattgcctcgaggttctgagtttcgtcactagaaagacgtatgaaggatgggattccgaaaagttcacgagtgggctctctgtccttgcgcggaacaagtttgcggtggaagacgggtacaaggattgcatcaccatcggaggtagtgtcagaagagttggtagatgctggaagaggaccaagatcaaagaacacaacggtgtcttcttgggaaatgcgtagactgccgaaagtatagtcatcgtcgcaaagaatttgccagaaggaattgtgcaatgtttctgctgcaaagatttgttctgcattaactcccaccttttgaccgacaaagttcttccagtccttcaaagtatcattttcatccaggcggactttcagagacaccggtgggccatcaagagggtaaaagttgattgttcgattgatcagtgttggacccgttgggatgggcacagtgaccattgtgaaaggatccatgatgatgctggtcttttcacaattgtggcagatcaatgttgacttgtacattccagcgaacagatcggtgataacggaggcgttacgggcctcgtagagctcccaacacttctttccgaaatcctcaagagccttgcgatcatgaatcatctcatcagtggaatcaggaatgacagtggatggcttgctgccaatgatccggcttagatcttccgacagtgcatcaaggagaaacatcacaaattcctgactatcatgttgatcatagccagcaaattcttcacgttgccgaccagcggcagcccggaacctagaggggttgacacatctcggctgagggtccgatttgtagagctcctgaagcaggttggcccattgcttggcaatggcgccgccgcatccaaggacgttgttgggattcagctctggtttgtacaatccacctggagattaagattagcatcacgttcgcagtatccaacagtaaaatgagtgtacttactaagaaagtaataagacaactcctcaatgcttcgcacacattgcaacgcagagttcatgtaacaagtattgccaaggttttgcaatcccacgatgagctgtcgacccttccgacctcgagagatgagccccctgattggatcgggagcaagtgtaggggtagatctgccactggcttgtgtgctcttcggtgtggcttttgcaacagctgctttgctagcagtatctttcttcggctgatctacagggatacctagactcttgagagttttggcagaggcttcagacacccattctccacctttggaaccgccgacctgttcctcaagaacaacacaattcgccgcggcgagaccagccatgtccaaggtcatgcgaccgttgtagttggcattgtgggtttgatccttgacaccatcaagcaacactcggtggcttccctctggaagttcgagaaaagcgttcaaatcgaaaagaagcttgtcgttggggtcagagatcagagccaatggaggagctggcgattggctgcgggagacagctggggttgccaacgctgaggcagtggtgctttgggggagctggaggattttccaaacccgaaccttggtggacatatcgacaccagtctgttctttggcatccctcaaccatttttggtaattcgtctggcgacttgccaggatcttcacagatggcttgacggtttgtctcaagatggtcggtgtagtacccacagctgggttggacagtttgaaaatggtgagaattggaggataagtctcatattcgatattttcagtatcaccgggttggttggtgttgtgagcatagcgaattatgatgggtgactggtcggcgaggccgtaccatttctggatcaagtcccaaccatgttgcggaatgattgcgaaatccagagcgtcgtgcaaaccggggcgcataggtacgaaaacttcaccagtttcgtctttgaaggtgggagtggccgggtcggtgtcgagcattatgttcatattgtcgacgggaccgacatcctccaatggtcctttgtccgtgtgatcagcatgagccgtagtacgtgcaagcaccttctttagccacgccattgacacaacaaagcccttttgtccatccttcagcggcgctgtcatcaacgcattcacctcagccacctggtcgtcgatcgtaggaatatcgtctgatttgggcgatgccggtctggaccgctcgccggccgaggatgccggcccggtcttctcattgcttgaggtggtaggataggggggttcatcgtttgtgccgtcgcatgtgcggggaataatgtatgtgcgggtgggattgaagccagtgctcacgcctccttcggggtcagagtcggtgatttcggacgccgggcgcttttcgccaggagaaggggatcgtccatgagttggaggtgtaccctctcgagtatcggagggcatgtcggaatggtcgctggagagggtgagtccggcggtcgcggtcgcgggagtgagcgagcggccaggcggacttccagactgaaactgcaggtgcgcaggcacgtagcgaggcggggacaacgacgaactctggccgcgggaggaggaagaagaagacgtgtggcgagagtgtggaggtacggagcggccgtgacgttgagcccgaaggcctggactggtgcgaggctctggggaaacctttcttctctttggggaagacgtcgtggcgatgagctgcgcacctcgtgtcgcagctcggggcaaccaggggaaaatagtagataggatcaaagtagcacccttacttccttttggtggaagtacaaggggatttggttgtgaacaagcgagttcgactggcagaaaatccgaagtttagtaatttttttttccggagcggaaacgaaaccctgggctatccacaggcgaccagcgtctgtagatgaagtgatgaaattaagataattggtgaacagaaaaaaaaaaacgtaggagtacaagtaaaagaagatatgaaaagaacacgatgaaaaagatgtaggggaagaagagaggagaaagattggaaagagctgtgaaggtcttatacttgagggcggactgttcagagtagttcgctcgaggggagagacttgtgaatgggattgattgaaaagctattgtgactcacgtttctcttaacgcgattctagttctattcctattgggggttattgtcatcttaatacggtgctattgatcctattgcgaacaatggattagggcacaatgccctcattatcgcgaacgactcatcagattagactttgcaaacaagtatgagtttgttagcagaaacaacacttggaaaatattaagcttattttgcattgtctccaacctagctgctttttataagcaaagccagccatggtgagatagatatgtacaataaaaataagaaagaagagaaaaagaaagcaaaacctgtaaatcaacgctcctccacgtaaagcctgtacatggtgttgttctccgctcccgagaggattaactccacatcagctcggtagggtataaggttagacgggtcactgcgaccccatgcagcaacagcattgagatcacctttgaatcgcatggtaaggtcgagacagcagtcacagagcatcaatccacacccgcgggattcttcgtcacagtctactacctcagcgtagacattgactggttgaactgcctggcaagacccgaatgcgggctcccgacacaggctgcaccattggtaaggggaagttcgaaaaacagggccagccttgccagtctcggggtcagtcagagcttcacttgcttcctctagaagtgctgcagcatcagtccgcatttggtctttcgttgacaaaggtacaggtagtagatggagagtgtcatgggagcattgtatgattttgcatcgattccatgtacagaagacgcacatccggctctgttcttttccttcggcaatgtggccatcttgtagctcaataattgtgccgttatctaatgtgcagacctctggattgcgaggaccaaggccagtgattccatatgcaaagttgttgcaccagtggcaagggggatcttcgtcctgctcatttgcgagaaacactacaggatgagcaagttcagtccagattcgatgagtgttcgcgtactgcgaagggatggtatttgagggtgtggtgcgagtaggtgactcgagggagtcagagatatagatcggtgagccctgcctcttcggggtgttcggtgtttcatcgtctgaatcagtgattacaatcacctcatgtggcttcggtccctcagcaacggagggatgtgcgctgctgaatagaggcgaagaggtctcccaagaattgccctttgtggggttgatctctggaatctgggtctttggttggataggggaactgagttgttcactcggtttagatacctcagaaacatcgggctctggggttccatcggttgagttggagggtgctggagaataaactggagaactgcttggctcgcttggttcacttgtggcaagcagtgcaaaaggtgcgtgtctagctggtccagcaacacattcgaacccatgatttcggcatgggagacaaggttgtgaatggtcatagtcggcgtagcgatacgaacaaatctctttgttctgccctttgcaacactcgcatgtttgcttccatttgggtggggggctcacgacgcaaaagacatcatcgatttcacatattgtgcaaggataggcgaacggatcggggttagatttaagcgagcattcaaagcctagctcttggcaggcagcgcactctctcagccgaagttcgctatcaggaggcaggacatccccagtcgactccgatgcctcggcctcgacctcggttgtgtcattcgtttgtggtgattctggcagcacgtcgtcattgtaggtttgaaggccgtactgtgaattcggtgtgtctatctcgggattcacggtccagtatctgtcccagctgtcgggctcactgtgttgagacggtgtccaaggggggacataatattcactttccgtgcctgcgctcattctcgaacggaatatagaaatcggagacaagctcctggctcgcttgtctgatcgagggccgtgataatcctcatggaaaagagatagcttgcgcttggtcggtgttctcttgctggaaggttggtagtctttatctttgtcattgtcatgccatgacccaacaacagcggcacgcttgagggcacgctctcgcaagtgatatggtccagcgaggtgtgggagcatgcagaatttgctcatactatgttcaaagacctgctgtgctcgctccagtctccctggagagtatgacatggtggctacgagctgtgaagaagctgctgtcacattaataagtgtcaagatcgtaataaccgcaagcagtaaatacttacaggttgtttagattaaaccaaccaaggagttttgtcagtttggaagccacacctcggttcctcgaagaatgaaaatggaggccgtggctcaagtgatgggtttgattgacacctatcaatgcgaaggtaccttgaaacgcttggaagatgcgaaaaatatgtatgaagatggatagatggtcgaatgtccaagtgacggtagaacaaggaatgttgatataagcattcaatggctcgaactgtacgttagaaagtgaattagaagtgaagattagatgatatcgatgtaaatattgactgcagtctgtatacagtaaaataaataaaataaataaaaggaagtggaggggtctcaatagcaggaacaattgattgaattgaattatattgaattacattcatgtctcgatggggaactgtagcaacatgagacaatagcctttggatcacagaatagtaatactacaatcaatagcaattctcacattcaacgcagaccgcaaagccgacaccattccccacccattatatcaattcgcccgaggcaggattcatgtgtcacttgaaattactcgttacgctcatagagggggcgggggaaacgacacccttcgtgggtatagtgacatgggacttggtcaaaaaggtagtttgtgtaggatctatgaagatataaatgagagcagtctggatagggaatgtcgtggcagtagaccaagagatcttggaaaagtcatcaggcatgttatcaattcgcgttggtgtatcgcattctcggcgtcaggctttgttatttcgagctttgctagtctgcccttttcaatgaatcaagctgtaataaatataatggcgaccagcccgaatcgaactaaagcctcaatcctattgggagtcgcttccaatgagacgaacatccccagcagtacctttcgccgtatcgtggtaaccgacgggattgtagatgatgaggagatatcgcagctgtaattcgaagacctagtaggcgaaatagattcagtgtccaaatcaagcttttctgaaagggtaaggctggcgtatatgttaacagagtctcgatcttcgtgatgttagctttggtttctctgagctttgctcgacacaccaaccacatagaatgtcatccatttggtaagaccacacccggtcagatcgcatatcggttcgactgtccgccatagtaacgataggtagattaggttggagggagtgagtggatttagttggtagagaggaagacaacagagtatgtcgtaggcctatcaagcaactactcgacgtctgcccagaatatttgaaggttgattaacgccttagatccccaggatcccaaaccattcattttgtacagttcaaaagtcaactagttatgatgttgaactttaatttatgtgaaatggatgttcgaagatgttcaaattcattgatggtcatatggaaacacgctacatggtattaacacgaaaccagaaagacaactgaagagaaggacaagcagtgaaaaacaaaacccaagtagcgcctgtaatgcagtcagtggcaatatgtgaggtcaaagcactttgattgagccacagccgttcgtgaatgcgccagggtatccatccatcaagtggagatgcaataataataaaagaacagagaagatggcagcgccgcagttatacgccccatcccatgcagacagaaaatatgtaaccaacaaggaaacttttgatagacaaaagaagaaaatcattggccactcgaggcccggaaatcatacatgcgaacttgatagtcatcaccaccagtgataaagcggctgtcgctcaagccaatgcaattgacagctgcgctgtgaccttcataggtatcttggccagtaggaacacgaggatcccagatcttgaccatgcgatccatgccaccagaggcaatccgcagagtatcagcagaaagagcccaaataccctccaggtgtccgaagaaggtacgaaggcatcttcctgtgctagtttcccacaatcggatggttgtgtctacaccgctggtgatgatatagcgcgggggttcaacgcggccttgatcctggtcaaaggaagagccgaatggtgagttcgggagagacagagacttggcctcgagaagaggggaaagtgtgctcaggatgttgtcgccgttttgagaagatgtgctgacgtggtcgttctcgcagtcggcgaggtggttctccagttcaatttctcgaggcaaagcaagaacttgctgaacggccccaatgtggttatggaagactcggatgcaagtcttggtatctaaatcccaaaggcgtgcggcaccatcgtcacaagcagtcagaaccgtgcgcgaagccgagtcgattttgacggcgttgactccctgtgggtgtggtagaacgaaagtagacttgtccttgaaattccaaattttgacagtgcgatcgacagaggcggatgcaagaagagtgcagtcaaagtgaagagcaatgacagcttcagcgtggccattgtatttggagatacattcgcctgtacgccagttccagattctgatgctgcgatccagactaccagtgatcaatttggtgtcatcaaactggaggcatcgcactccggcaacgtgacctttgagagttctcagttcttcgccagtgtctgtgtcccatatcttgaccgtagcatcataggatccagtcatcaaaatgttgtcctcgaactgcagacacatgacactgtctctgtggcccttgaagaccttgactgagcagcgcttgtgcttccaattcataccgacgacaaatcgatcccgataaacctctttccacggacggtaacgagtcttgaaataattgtcatcctcttcaggggactggggaagcgatgcacaatggcgctttgcaagaacggagacttcatcggattccatcttgcgtttgccactgactctaggttcttcgaccgtcgagcaagattcgaccattgcggcttcagtcgacccagcggcaggctcgttgttgccccagttggtagcgcgcaattcgatctcgcgcttggcttcacgcagacgcttgcgatccagaaggggaaggccccaaccacacttgttacactttcggcggatatgttgttcgcacatccggtgccaaaccacatcatcatcggcgagggctctccagcgggaagaaacttgtgctgctctgcacaaggaagccgtgtcgaggtaacgcagaattttgaaggatagctccggaggcagggcaccgaggaaatcgattcggatgagttcgcggacactggcggaaatgtaggatagttgggggaagcaggactgcgccagaattccctgcagcatgagagttcgctgcttcgccggagcagcggagaacaacgaccacacatgggaaataccgcgttgatcacattgaggaagtaagttcagctcagattgcagctgggtcatcgactgttcatcggcttggcgtctgccgcattttgagtccggttgatgccgatagcagtagctggcatttactacgtggtgctcggatggagcggaaacctgtgagcgcaaaggcgcatattgtcgtggctgatatttttcgaggaacggggccacattttgcctgcctagttcgtccagggtttgggtggtattgtcggtgtttttgcccggcggagagcggttggagtcggcgttcgcactgacccccgcgtttgcgatgaccaggctctgctgcgtggacgaagattctggtttatcggccatgatggctgatctggtctcgcgggtgtgaggggacggccgctcgggcgagtgacggtcgtgtctgatgtaccgagataagaaccagtcggtttgcgtatatccctgatctcttgggttgaattgattattttgagcacgcagaaaatatgtcaatcaatctcgcgatgtatgtccttgagaattgctcgacgatcaggatagaggggggggtcaagggctatttgattcaaccttggaagtaccctgagaggaagtattgagataagagcgatatcgagcttccaaggttggcaactaaattccacttgaatgataaagagaaagaaaaaaaaatggatcgacagaggcttttaaatcagatgattattcaatgactgagaaaattgcacaattcggatgtgtctttgatatcgccatcgatcagtccggggaattattgcgtgacaggggcagagcggcaaatacgtgatctgggcggtgaggctgcacgtgacaatgatccgcatgtcgccatctccacgccatcgcacctcaatcaatcagttcctacgcttccgacaggttgattcgctatcatttggtgcgacaggggtgaaacgggccatttgatctttgtatgatttcaggctagtcccgcagccatctcacaccgacaactcacactttgtgagacccactgtccctagctttcttggttacaactgcggatctacggagcaaaccttctgtgaaccgcttgccgtataattcacgtcttaccctgggaatcaggtctcgaccgagaaagcctcaggctgtttttcatccctttattcgcaagtcatttctgggctagagctcgtgcttcactttgggtccgccgtgtagagcacggccctggctcattgtaccgagcttccaaggtccccatgacctagctcccaggtctatggtctacaaggtagccattctctcctccagttttgaccaactctacagcagtctaatttggcaaatataggcctatattgaagtgtcctaggggcttggtggagtgaacgcgttttatcaccccatttaccttgtagctgtcaatcaatttcacccttgcccctaaggggtctaccacttcatcgactctggtcttatcttattccgaatgcgccattaacaaggttaattgattttcaaaatggcgtcatcccagtcctctttatcgtccattcgtccgcaggctggactggacgaggaccaacaatccctaccccaggttgacactttgatctcgtatctactgggtgccaaacgctcgctctcctctattagtcatgtctggcgggccaatgaaatagtcactgcgtcacactcagcactggagaagagtgttgtcctgtgctctcggacaggcttcttacgccgaggcctcaatggacaactccgtcttttatacgacgttcgaaccgaggtcgagcagatatcctaccggggtcgtgatgagttttcattggcactaaaaaacttggatgctgctgatgctcggctaagaaacacgttagatctgcttcgcgggaccatcgtccacgcgtcattcagacctggggatgaaaagcagaagtccttacatgactttgtcgatgagcgaggcgttgaagagctacatgcatctttgaaagcgtctatcgatcgcactaacacagcgcgcgctgaactggatacttccaatcgtgaattcgatgacgaacttcaagccacccgagagtcgcttcgtcactaccacacagccacaaagttggcgtcatcccggttatcaatcacatcttcctcgtcgtctgcgtccgattccggccttctcaccttgtcgtctatgccgggccagattcaatcactggaggcccatgctcaagaaatggccattcttttggaagccctggtcaggcattttgatctctgtgtcaccgctgtgaagcataccgatggcggaggagcagttgcgcgatccatcacaggggatatgccaactggtgttgatggcagcaatgacggaatgccaaacatcggggcagagatcaacgccaatctgaatgcacctcttgatccaatgactgacgccgagtatcaggagatggtggctgttttaatcaaagatgcccccgaggcggatgatgttgtcatggagatccaagatcgcatcaatgagatggaatccatatttgatcaagtgcaagctcagcgagatgccctgctgtccatctctaaagcaacgatcgacgtgcacagtcacctttcctctctcgcctcctcccgcttacctcgttatatttcccaggcacacaacttcacgcgcgtgtggcttgaagaaaatgaccgcattaacactggcctcgctgaactctctgatctgcactctttatacgatgggtttctcaatgcttatgacagcctaatgctggaagtagcacgtcggcgtcatgttcgccaacgtgtggaaaaggtgctccgagacacccggcacaaactggaccagctccacgatgaagatgccgctgctcgtgatactttccgtgctgaacacggtgactttcttccctctgatatatggcatggcgttggcttagcgccaatgcaggtgcagttcactcgtctctcgggcggccacctagatagtggtcctgtggcgcagaatgcaatcgatggacctaaagcagacgactatacaagggctgtcgaggcagaagtaacggatggcagtgccggaggagaagagatccctgacctgccaagagacctcgttgaggaagcttacgcaagggtcaaggcacgaaataaagtggcgtcccaaatgcacaccgcttgatttccgtggtgtctacgcttgcaactttttactttcatccggtacaccgagtgttgtaccattgcaattggcgtccccgacctcgctctaaattccccaccacaattgtagctaggatggaaattggatctttcacatctcaatgccgctcctaacttttacatcatggcattggcatggtgcggcttaaatgaagaaaacacaataggtctgaccttccgtcatgctcctcatatatgctccctactcgatgctcatcttatagatgcatactcttgcgttattcgcgggatgtaagcactgtttgagggcacttgtggggaattcatgacgagagcacggattggagtgatgaccaaagagagctctgataagtttttacccacccgatttggtttctttttctttcgaatcagttgtcaatacttcgtatatagttattatgaatagtctactcttaatgaaagttttcaggttcagtcttgaggagcttggatcaaatatttatgttttcccaattctatcaagtatagaccaaggtatcaaatgcccaatgctccatccatatatgcatttcatcatcagatcatgccaagcggtagatgacacagagtgcaaacattcgcaactcgtgcacatgcaaagaaagataaggtcagaaagctacgagagcttatttcttctttctacaagagccagaaacaagctttttcttcatgtgcttcggcatcttgtttgcccgctgctcacgcttctcctccttgacctttgccttgtggtcgcgcttggagtctttgtcttcgaaacgcttgcctcgtggcggcttcggcgcgaacggatctatttcctcgtcatctgagtcggatccggagacggagacgccgccgcttgcatcagacgcatcatcttcgacagcatcagtagcagaggccttctttttttcgccggccaagaggtctccgtaaatcaggtcagcaccttcgccatcgcggatgcgttcggcgtcacgttcgacatcatacacttgctctagggtctgaggaatatattgttgacggaagacggcggtgtcaacatcctcggcctcctgctgctcatcatcaccctcctcacgggcaacgaggagcttttcgatggcagtcgtcatctcttcattgccagcggtgccatccaatggtccttctggggagatgatgaactggaacacagtccgctcgggaagagtctggatgttctttcggcggaagaagtcgctgacgttcttgatatccatgcgcaggaattccagactgcgcgggtggtcgtgctcaacactttgactgacatcgatgatatacaggcgttccttatggtacagaatgttgtactcactcagatcagcgtgcaccagacgacatgtctggtacataacgcgcatatagcccaacaattcaatatacagtgcgcgccagcgagtttcaggttcagggatattgaagtccacatccttgaggcgcggtgcgcctagaccttttgagctaccgatgaatcccataacaaggacgtgcagacgaaggaagataggctcggggcagggaataccagaggcatagattcttcgcaggtttcgcatctctttctcggcccaaagtttgaccatggcgcggttgttgctcttgttgtaaccctggcggaaacggaactctccggtgacgtacttatcgcgatccttgaataccaagatacttgtcttgtagaccttgatcgcacggtgtagtggggcagcatccgggtcttcctgcgagacggacatggcatggtagacattcgcttcctttccggtcgacaaacatccgtgaatttctgagacgaggcctcggttgatcatttgcagcagaagcatccgcgtacggggatccaacacttgttctgatgtggctcggtctgccttatctgctccacccttgtcgctgcgccccgaaaagccggcctgttggtcgtccagcttgatcttcgcagcatgacgagtgagagacttgacctggtcatcgacatatgcggatgtattcacggtaggcttctgggtgttcgtcttggggtatgtccatctcggcacgttcgagtcgccagcgaggtcgttgattctgcgttggcgattgtatgctttggtaagatcggtgttgtcagaagacagaatatcttcacgatccaattcatcgtcaaaaatgtcgtcgtagtactcgtcgtcctcttcctcttcctcttcctcctgcccatcgggcggatattgccccgcctcggcggagtctgcggtatcagggttcacgtagcctttgttgggcacgtaggtatgcgacggcgcgaggccatcggcaattccagctgccgcggcagtattctcattcgaagccattctggatctccaaagttgagaatgtagagatttgaaatatgtcccgcgggtccccaaggttttttttttttctgtgctcaaattagggtcaccgcccggcagaaccccgcgcccaacgagacgcgctaatttcgttcctcgcgtatgtaggcaatctccttggttttgcaacgaatcacgatacccctcggcctttgtctgttcattactagagagatctgctggccttgatctttgtgatatactccatccttaattttgctcttgcgccaggcgcgttatgctgagagtcctctgattgatcctcgcgtcgcgcgtttcttctcaagatgtatgtcaagcagatcattatccaaggcttcaagaggtattttcccaccccatccgcaatctctatgacgttatgaaatttatattgacctcgtaccaaattcagctacaaagatcagacggtcattgagccattctcccccaaacacaacgtcattgtcggccgcaatggttccgggaaaagtaacttcttcgcggccattcgctttgtcctcagcgatgcctatacccatcttggcagagaggaacgccaagctcttttgcacgtatgtatactggtgttgctccaatctacataggttgaccccaagcaggaaggttccggttcggctgtgatgtccgcctacgttgagattatattcgacaactccgacgatcgattccccaccggcaagccagaggtcgtcctgcgtcgtaccattggtatcaagaaggatgaatacaccctcgaccgcaagaatgccaccaagaacgatgttatgaacctgctcgagtcggctggtttctctcgctccaacccttactacattgttccccaaggccgagtgactgcgttgaccaacatgaaagactccgagcggctgattctgctgaaggaggtcgccggtactcaggtctacgaagcccgtcgttcagagtctttgaaaattatgagtgagaccaacagcaagcgtgccaagattgacgaactcctcgattacattaacgaacgtcttgccgaactcgaagaagaaaaggatgagcttcggagctatcaggagaaagacaaggagcgccgctgtctagagtacaccatttactccctcgaacaacaggagatcggcaaggttctcaatgagattgaagagcgacgacagaacggcgttgaggatgccgacaataatcgtgaccaatttgttgagggcgagaaggccattgctgagatcgatgttgagatcgctgagtgccggcaacagattgagttcctgaaggttgacaaggctcaactagaggacgaacggcgtgaagcatcgaaaactctagctcagaatgaactgcaggccaagtctcttgctgacaaccaggctgctgcacaagcattgaaatcccgctacgactccgacctcagctctgttcagaccgctatcagtgagcgtgaagccgaacatcgcgaaattcttcctagattcaatgccttgaaggatcaggaagagacagttagatcacagttgacggatgccgagacatcgcgtcagcgtttgtatgcaaagcagggtagaaactcgcgattcaagaacaaatctgagcgtgacaagtggcttaacatggaagtccgcgagagccataattccatcagcactgtccagggtgtgatctctcagacacaagaagatatccgagaccttgaaagcgagattgccgctttggagcctgaaactgaacgcttgcgccagcaaatcgatggacgcggcgacacaatgcatactgtggatcaacaagtccaagatgccaaggatgaaagagaccgtctcatggaccaaagaaagtaagctcgcttgaaccactcataggctataaccagacattaatgattatgtagggaactctggagagaagaagcgaagcttgactccgtgctttcgaatgcatcccaggaggtggaccgtgctgagcgcaatctctcgcatatgatggataacaacaccagtcgtggaattgccgcagtgcgtcgaatcacgcgtcagcataacctcgaaggtgtttatggtactcttgccgagcttttcgatgtcaatgatagatatcggaccgccgtagaagttactgccggccagagtttattccactacgttgttgacacagatgaaactgctacaaccgttctcgagatcctacaaaaggaaaaggctggtcgtgtgacattcatgcctctgaacagacttcgtactaggccgatgaacatgcctcgtgctagcgacacaatacccatgatcgataagttgcagtacgacccggcatatgacagagccttccagcatgtgttcggcaagactatcatttgccccaacctacaggttgcgtcgcagtacgcacgaagccacggtgtcaatgctatcactccagagggtgatcgatcagacaagcgtggtgccttgactggtggataccacgactctcgtcagtcacgactagacgctgtcaagattctagctaagtggcgagatgagtatgagaccaagagaaatcgcggtaccgaaatccggaaagagttagaaaaacttgaccagctgatcactaaggctgtcggtgaactgcaaaaacttgagcaacaaagacatcaggtccagaacagcagtggacctttacgacacgagttgagggccaaacgtgatctcctccaaaacaagaccgatactcttgatgccaagcgacgcgctcttcgaaatgttgagtctaaccttgcggccctgaacgatcaagtcaatgcgttccagactgaactgtcttctcctttccagaaagctctcaccagcgaggaggaagctcaactagagactttaagcagcacagtgcaagatttgcgccgccaataccaagagcttgccggtcagcgaagcgagctcgaggcacgcaagtcagtgttggaagttgagcttcgagagaatctcaaccctcgtcttgaccagttactcaacagagacattgacatcgccgacgaggaagttcaaggcaacttgaaagagacacagcgtgaagtgaagcgcattggccagacgttggaaaaactcaacgcccgactcaaggaagttgacacctcaattgaggaaggcacttctcgggtgatagatctgcagcagcgtaatgcggagacccgacgagaaattgaagacctcgctcggtctattgaaaaacaccagcgacgtatggagaagagcatgcaaaagaaggcagcactcactaagcaaggtgccgaatgtgcggctaacatccgttccctcggagttcttccggatgaagctttcaccaaataccaaaataccgactccaacactgttgtcaagaagctccataagaccaacgaggctcttaagaaatattcccatgtcaataagaaggcgtttgaacagtataacagttttaccaagcagcgtgagactcttactacgcgtcgttctgagctagatgcatcccaaaaatccatcgatgaccttatttctgttcttgatcaacgcaaggatgaggccattgaaagaactttcaagcaggtctcacgcgagttccacaatgtgtttgagaaacttgttcctgccggtcgtggtcgtcttatcattcaaaggaaaacagaccatgctccccgagtcggtgaagatgttgactcagatgacgaggcagctcggcagagcgtcgaaaactatgtcggtgttggcatcagtgtgagcttcaatagcaagcacgatgatcaacaacgtattcagcagctgagtggtggacaaaaaagtgagcatttccagtccgaatgcgtattttgttttgctgttgctaaccaatctcccatgtaggtctttgcgctctcgccctcgttttcgccatccaggcttgcgaccccgcaccattctacctattcgatgagatcgatgccaacctggatgctcagtaccgaacagccgttgcacagatgctcaagtccatctcggattcgacaaatgggcagtttatctgtactaccttccgacctgaaatgctgcacgtcgcggagaagtgctatggtgtaagcttcaggcaaaaggccagtactatcgatgttgtctcccgcgaggaggctctgaagttcgtggaggagcaaaagacttgatgtatttcccaggcgtgctctttgtatattgtaatcaacatttgcttcgatggactagctggctggcgtattctgataccgaactctttttttattcttcaatttcaaatttttattcttgcggcgtagttctttgtatatttctcaacgaattggatttccttgaccgacggacttgaaaaagaagcgaagcttgactgcaggcaaaatcggatatgtatgtggactggcactgtataaatgcgacaaaacgatttcatttcataatttttacagcgttttcacaattcaagctagctcacactcaatcaaactctccacgccccgctgcgcagtccaaatcttgacaatcttcagcccagcagactccaacaacgcatgccattggtgttctgtacgctcaccagatccaatctccatcataatcaaatccagacttgtggtttcccaataagcccccgtgtctggaatcacattctcgttcaccaacaccttgctataaccaggcttcatagcagctactgtattagcgaggatattgcgacaaagctcatcaggccagtcatggagaacagaatgcaagtagtacgagcgggctcctatgcgggcagaatgttagtatatgccagcaatcgatgggctcaatatttcaatacgcatggtcaggggaaagtcttccgtttttgtacctttgactggttgctcagtaaagaaatcatgagcagtaacttcaatcgtggggtgtagatccttaaccgaaaccaccacctcaggaagatcctgaagcaccagacgaccggggaggccaggccatttccgacggaaatcggatagatcatggccgaaactgcctccgagatcaacgagcaggacatcgtcctcgccaatcgtgacgccgtccacaagccgctcttggaccgggtagaagccgggatccatccagcgtactcggccttgcccgtagactgacatgtgattattaaactgctttgccgtgagcggttcttgctgcaaatgtccgaagaagcctatgtctgtttcatagcccatctggaatgctgtatctgtcggacttgtgggattttggtagttgtttttcttgaggaaggtcggtagagccataatacctttggtgaaacggcgtgtcctgaacttgttagtcggggttgagggtatggagctctgactatcaacctacatgagcggaaatgcatcgctatatctttcaacagtaaggacttttgagaagccagtcgggctgtactcgttgtagccggtctcggttattgttcccatcgcagcgagatgcttcatcagtcgccctacacgatttgtcagatattgggttttgctggcgtacaaacaaactactgaccgagcaagattggatccacactggttgcctcagcaagctcattgacagtcttcggtctgtcatctgttccaagagcagagaatagatgtatgtcaacagcggtctctatggctgcataactcgtagactaagcaaatgcaatacccatcagtcgaaacagtttcaaacttgtcttgggccacattatggtagttacaacacacctcagaccagcagtgtcgaatgattgcctctcggggggtttccaatgcataagccaacgattggacggcttctagtagcttaagccgtgctttggggtcctgggcaaggaggtctttgccatgactcgcaaccgtttcaaggagatcaggcacggtatctggcaggtttgagatgagagcaagaccctctacatcggttgcattggacgccatgatggactgtgtttgctgcgatgtatatgtagaagaggaagtgggagtcaagaagtatctcaacaacacaatctcatgttactaaattctagttgccaacatatattgtctagtaaaattgccaaccccctgacaggatcactatccctgtctcctagtacattagtacatacattagtgtcatattttgttccaggttaagcgaccttaagccacaattggttggttattgcttctactgagctaaactctatgacccatgcagtcattatctaaccgagtgaattctccaggactagagctattaacagctccgcataatgcaaggatattggatccacgaacaatacacgcattgactggttcatatgaatccgacaggaaatcaaaggtacataatacgagaattactttccagggttctacttagcgggaccggggcttttcggattcaaaggtactatcttattgtgcgtacttttgtacttagtactataataaacgaggcaatatatggagtgcaatttgtgaaaacacgctaaggccgtactgtctgggggccaaaactatggacttgttgttaagccaatcgcgatcctagcgctttaggaccctgatttttctagggaagcgattggtcaactcagctaaacatgacgctctatgatcccgtaggtacgtgctataacaatagtacctaagtacaaattcttttagaaataatatgtcctcggctggccatttctccacatttctttttggtcctcttaaggccagagaaaaccgtgattctcctataaggaacacatcggtcgctactctctatcatggcaaccatggacgctgaatacataaaccagacaaagggtccacgtattctaggggtcttctgggcttttttcagtgtaagcgtggtgatggtatccttacgattttatatccgagtccgagtgttgaggaacattggactcgatgattatattgtcctggtggcaatggtatgtaccttctagttgattttgagatacgccagataccaattacataggttatggtcaccagttatacaattctcaccacggtgaacgtcgttttaggctacggaagccatacctctgtcttgatggaaaaaggcgagattgacttgatcgaacgtattctagtcattaattatgcaaactttgcactaggaatcatgtctttcacaactccaaaactggcaatcgctgctctcctgaatcgcatcatgaatcccagccgcttgagccgagtatggctatggatattgacagcctcggtgttcgtgacatccaccatctgcatcatcgttctattcaccatgtgtgatcctccccgggctttatggaaggtacatctcatgagtgagggggcaaaatgtcgttcgaccaagattttggtgggctatgcaatcttcactggaggtatgtttctggactgtatgtttttcgcaaaccagcaactaaacattctcagttctgtcggcgggggtcgatctatatcttgcagtttacccgactgtggtattgctacaacttcaaatgtcgattcagaaaaaattggccctgtgtgcggctttggggttgggcgctgtgtaggttgattgatgttattgtctggagaaagtagctgatcgtctacacagagcctgcgcaatggctattattaagtgtctacagctaccaggtctatataatacggaagactcaacatgtaagttgctttcagtgcataacatgagatatatatcactgacacggcataatagatgcgacagcagatcttgttatatggacgaggtatgttttaagtcctgtttttctccggccttgacacaaaaacttatatcggcgtctcatctatcagcgtcgagtccaacatcatcataatggcctcctgcatcccaaccttgggtccgatctatgaaatgattcgaggcagacgttcctggagctcacacgcgcgatacgagagcggaaagttgcgctcttacacggatagacccacgaagaaatcggcaagcaatactcgcgaggacgaggatatcctcatgaccacggatattagggttacaaggagcggcagccaagaaagcattttgaactcggatcaactccggaaagaggcctatgtggcaggtaagattcatcgcacggatcaggtaaagatcgagtacgagacaagacctcaaggtgagaatggacctgcaccttcatggtagcatggtttgtctactagtgtactactacctcttatgatcattattgcgggttgactaagttgtaacctttcaactctacctaattccatcttttcttcccgagcgatgttgtcgggagcaaaatgcttctaatctatcaacaatcctaccagcaacttcactcgtttacccattcgaatatgatatcctcggggacatcacggaccaaaatatggacatgctccaaggcccgcacactctgtaggccaacccaattcttaaaccatagcacatgggagtcagggtctgagaagttttggggatccttagccaatcggtgcacgaaagtcttttgaacaaaaccgttgatgattgcacgagattcatcggtcaaatggccctcatcggattgtacggggataggagtgcgtagccacacgacaagatgtgagattccgggggtgaggccatagggccagtcattgcggaggatcttgtagtcctcgggatcggcaaagggacgcgggttcttgaaggtcgctgtcccgctttgctggataaccgcggagccagtgccgctggcagtgttcagcggcaaatcccactttaatcgccgctggcaaatataattcatgatcgtgccatactggactttagtctcttgtgtccaggccaggtaccggcggagatcggaaggcttccgcttgagtgcgccgaggtcatttcgtgctattacggcatatggcatgaggggaattgttcgagcacaagtgagaaatatacttaccgatgatgctttttaggtcttcccagtcgtggtatacgtactcctcgtcggtcatggccaggagcttgtggtccaattccgttagattaaaggcagggacttctggtacttcgggcattttggaaatgatcaaaagaagaaatcaaaagcgatgtcaagcaaggcaatagcctcagtaaatcgaataactccagcaaatccagtaagtccaagtccaagtaagtccaagtaaacacggaaagccggggaaatcgtaaccccaaagggtgggaaattccgttgggcggagccccctcatctcttttttatcttctctctcgccttttcttcttctctttctgcttctatcgcaactgtcttattgaaatacagtgtccgagttctgtcataatgaggtgagtcgatcttctcctgtaatatcgaacaatggctgattcctccaagcctcgccaacatcggcacggccctcgtgccctcggccctgctcatcgcgagtgtttacgccattaagcccgagtttatcgcctatgcaattgctgtcgctggagttctggctggttacttggttttcagcaccagtagtgcgtgcatctttttatgtccaaatactggagtgaggaattaagctgacccccgatgtcgcagagcctcgcaaggtcttgaaccccaccgagttccagaacttcgtcctcaaggagaagaacgagatctctcacaatgtcgctatctaccgttttgccctcccccgttccaccgatatcctcggcctccccatcggtcagcacatctctctcgccgccactatcgccggtcagcccaaggaggttgtccgctcttacacccctatctcctccgacaacgaggccggctacttcgatctgctcgtcaaggcttacccccagggtaacatctccaagtatcttactgaactgaagattggcgacaacatgaaggtccgtggccccaagggcgccatggtgtacacccccaacatgtgccgccacattggtatgatctccggcggcactggtattacccctatgctgcaggtcatcaaggccatcatccgcaaccgtccccgcaacggtggcaacgacaccaccaaggttgacctcatcttcgccaacgtcaaccccgaggacatcttgctcaaggaccagctcgaggagttggagaaggaggatgatggattccgcatctactacgttcttaacaacccgcccgagggctggactggcggtgttggctttgtgactcccgacatgatcaaggtaagtttgcgtgctgtgctcgcctgtgccacctcggtattaattaagctttattataggagcgcctgcccgcccccgctgccgatgttaagattttgctctgcggtccccctcccatggtcagcgcgatgaagaaggccaccgaggctcttggatacaccaaggcgcgccccgtcagcaagctggaggaccaggtcttctgcttctaagggattcgctgcgaatcaaagaaaagttgctgttttcgaacttgactctgcctttaataattgtgaatcttctacagaatgttagcgggcccgccgtgaagcatttttctttttttgatgtataatctctggtgtggttatatatgtgaatagacctcggcctacaagggattaaatgagcgcaccggggatcgaatgcgtgagatatccgcctaaaccttggtattataccatgttcttaattgtctaaaagtcaagactccagccaaagcaatggctctaaaaattcccatgagcgatgtccccttcaaacccctctgcgctgcctctgaatccatgaaagtcctaggattcgctcattttcatcgccatcagcttgtcctcgggctgggatttgcctggtggctttcccaaatccgtgaaaaggtccttatgccggcaccggggacaacgactctcctcaagttcacttggggagagtactatggatataggcagcgggggtagatcatatacacaaggctcgcacatgcggcaaaacatacagtatagtccatatcgacatctctctccacaacaagcgcagggggcttcctcatggccgtctactttaatgaagtcacctggtcgatatatcctgttctcgcagccgcaatcgaagcaaaatcgacggtcactctcggcgtggccttttccgcgcttggctcgtagttgattatcggcaaacgcttttcggggtcgaaatttcagacatatcttgcacgaaaagaggtggttatatctggaataattagtaactaggagataggttgatcgacatagcaagactttgtcatgctaggaagcagctacattggccattgctctatttcaagtagaaacgatagtttctgttcttctgtcgtaggcggctttgtaggaacaatagccctgaaacgttggtttgtttggaaaagtgcaacagatgaggggtatcaagagattttatgatatgtaattggagctcggtcggcaaatccaatatagtaatactagtcatactgctcatggcgattagatcagatctcaaattgcatttaccttagagaagaagaatcgacggggcgtacagcctaaatcgacgacagagcgaaaacggctctattaattatagatcacgtgacttctccatatactcccgataattattccatactccttatataaattgatattttccagagcatatgcattcttcacatagtaccctcgtctctatctcgaatatggtgctaccattagtgagagaggtaatctactctttgaaaggtttaagatagatgcatactagaggtaaatgcagacagaggaagaggtcataatattatatacaggccaagaccataattgtacaggcggtgattagagcggtgagccaaaaactagtttatttagtttatcgtagtggtccgattcgtctgttgagaaaagaatgacgtggatgatttttcaaggcctagcgatacgaatggacatactttacttagcaacgtcctggtacagtacctattgagatgtgttctatctagatatgcgctcttacatctagctataaagttgatagtattttcaatttgtcccaaataacaaatgattcaaatcattaattgaaaactattcccgattgccactaggtgcgggcgaatgagagcgggaagatccaaatgataccctatcgccatcgcgaggttgagttgtactccgagtcatacccgaagctgtgattgcacgtgtataagcatcgtccctgtcataagacgatctgttgattgctgtgacaacatatatatcgtcagaactggtattcacgcttcgcaagtccataaccttaccttcatctaaaccctgagaattgttggcattagacacttcttccacgtcttgactgcgctttttgtcttcattgcgatccagcccttgtagagctcgaactccgtacgatgccgtttcgctcatgtaccatacagctaacgcccgtgtcagtatacggatatgaatgccagatatcgtagtccatcaagaccgagacaggcctgcaagtagatatattgacttactcttgaatggcagcatcgcaatctttccacaagtaaccgcagacccaaagcccacagttctcgcgactttcatcgccgtctcggttcgcgttttaggttgcgcgactttctggcccatcggcacgggtgcgtcattctcagtctagacaatcaataatctggtcagttctgggtgtccacttgagctaagccgcattgcgcttgttacctcgcgtttcctgtgcgcatctgcgatatgcgagacagtaggtttgatgatggctttgatcagacttatggatacgccctttgcgtcgacaaggaacgtagtcttgactttttcttcgacgagctcgggggttttatcgcgtcttgtgtgtgctgggtactcatccctgtttaatgtcattagctcaagttcccaagttcaaaccggactggccgagtcaaaaaaggacctacaattctgccgtggagccgcctcctcttgtcgaaatgacgaccacatcagcctcgaccttgctgctaaacgatggttgtaattgcatgcgatggatcacaggctctgtgtcagcatcactgcattgaaccttctcccattttaattggcgatagaatgattggacggcgtttgcagtgccgttctctccctggatcttctggcctaaccttgaagcaactcgttttacctctggtcgtaggcaatactggaacgcctcgaaaaagacttcgctgctgagcgcttgctcgcgaagtggagatggaccgagtcctgcgttgtagatggtcgttgcccagaagggttggctaagaattatcagcgtgaaaccttacaatttaggctcatgcgtggcccgatcaaagaaattcaaaaatggaaggcttactcgcaaagaagtggtagtgagatcattggtttcccgtttttagcaccctgtacgaaggtgtatagcggccaacagtcggatgcctgattttaatggttttatcgcctaattgggactagctcttaccagttttagaccgcctttgacaccgctcaataccatcttttgtaagtacacatcgaagagacgaaactgttaccatggggtaattcaaatgccttctacctattttaattctcaaaactacattcaaatattcgccacgccggagccagaggatacggagagtttgaagtttatacggtcggtaggaatggggactttgtgttgaaatccaggcttggctttccaaccgttttgggccttggtgtcagttgcgctattagcttttctccgggaaagtgcgggactacggcgggtatgaatggctttaaatacaggagattcatatagttggagggccttaacgcctaggatcgatgagaaatagtattttggggggggggggggggggtatgcaaactttctttttccaatttttaaccnnnnnnnnnnnnnnnnnnnnnnnnnnnnnnnnnnnnnnnnnnnnnnnnnnnnnnnnnnnnagatgggggggggggggggggggggggggggggggggtatgaatagcttcatgtttcaactttcaagctgttctcaatttggtactaggagatctgtcatagtaattcaggtattttaatttcctgccggtctaaaattggtaagagctagtcctaattaggctataaaaccattaaaatcaggcatccggctgttggccgctatacaccttcgtacaccctgcttgaccgttgggatgtcaccacttgtgaataagatcgatactcggcggatgagccattctttgacttttgagaattcttcaattagcttcgttgttttcataagtgttgatcttatgcggaaattacactcaccatttgggtcattctctaacaagaaaatcttcggcaattcagaaacatcaattgcttctcggaacccactcggcagaagcaaatatatcccatgcttctgtgaagcttccacgagatattgaacgaataactcagggtttttcagttgggtgatgtccagagcaacgaagacaggctcaagtgcggaatcgaggaaattctttagcgcctttgacggggtataagaagatgggctttcgattgaagtatagccggaaatgtctaagaactcatgttagaaaagatctcggtcgagtccgagactggttttgcgcataccaatggtgtcatcccagtcctctggtttggggagcaattccgatgaccatagataggtatgagggatctttgattctcttaaaatttcagccccgctagatagaggcagctgcggtaggtctaggactgcttttcggaaatgatcgacgacattgcacaccctagagtactgtcaatgactgtctttatacggctggataattcgagggtcagggctatacttactcattccacgccgactcccagaccagtagataggaaatatagttctgcaactggtaatcaatctcactccccgtcgcgatctgtgctagcgggtgtacgaatcgtctcgtcggtgtccaggggctgttggacattatatgaagcgggatggataaccgctccgcacaatgaacatgagcgtgtgcaagaggtgttgcgatgatggcgttggtgacaaagggcttgctttcgtgcgagccggggtagatgcaggcattccaacattccttgagtgtgtttagcaagacctttttgtttttcaagacctggtgcctgtcaaggccatttgaatcaggcatgaggccagaatcccttgcctgttatgtatgagttgtttgtttactgcagtaccggtgaagatatgaagaggaacttaccgcgataggatgctctgggtcgttgctgatggagaaaaattccaatccggccctgtgggcgagcgattggaaaattgagtgtgaagcgactcggactctgtggccctgtcggtggagttcctggccaaccagtataatagatttgatctcctctgtcatgaccattagcatgggtaggagtgccctcggcgatgttcaattcttacctctgcttcctacaagcatcaaaacaatatccagtggaatttcatgagttccagatacggtcttcacatcatcagtgtttatgggaagtaaatctgagctggagctgttggcttgaatttgtattatccgtggtcgttgggcaggcaataaaaattgttcgattagcatagacgtgcgattcccggcacttaaatctatgctaaagcgaccgatgtctatatcgttgaaattagttagcacaagaattttcaaatgtgtacttctttctatcttgagtaccttcgatcaggattgattcccgcctttcatcccgggtggttgacggtgaaagtagtaggtcttcggagaatagagagctgtaggtgggcggtggtagctcattagcaattgaatggtcgtccatttggctgccattaacaatatcttcttctctcagctcttgtttggagaacattttgctgaatcttgggcggagaacttcagcggaaagatcgcattattaaagataccccagtggcgtatggctaggcaacttcttttttttcttccccttgaaactactattaaggttcttgaccgttgatgatccttctagaaccaatccactatcgtgttgtctagggtttctatagtcggatcgaatacgaacccgaacccgagacccacatcttgtcaaggttgctactatgcatagggtgtgaatattcgtattcggcttcggatcatatcgaaacatacatttggtctttcacagtaggagtttatgctatctttgtcaaagttgcttcaccatataggatcatcgtctctatttccaagttcttctctttggtacctttataatatcatccggtccatataagaattctccaatcatcaacggaacagtccgagcgaacaatgcatttctgggggatctctcttacctagaaactgactcggtcttttcttttcatactatgatattggtatttttagactaggctgttttgaatctgcttattctatataccctatgccccttctccccgcataagctccatatcgtcaagtttgcgatgtcccccagagataatttgacttgggtggaaaaccaggaaaacgatcgtaaccgcaagcataagagcgccatcaaagatatacgcaaagtactcatgactttgcaaaaagccagtcgacccttgaatatactcgatgactcggtagagacaacgggtcataatcaaagcgcttgcaaaatagagcacaagcatataccggtgccagttcaccgaagtagccattgctgcggaagtggggtagttcgccatccgcttatgaaagatgaccgagacgacaacgaagaagccaaagaagatgatttggacgatcaggccgacgataatcacatcttcgccgagtttcaacttgctagctgacttagcactagacatgattgcgcctcctatggatagaagttaataattgatcccttgcgtgagagcgatatagcacttcttacctccactttgaatgaaaaatgacagcacatcgcctaggacaaagatcttggtcaatcttgttgcgcgaatgagcgatctagaatcaccatccaccagacgtatgatccgaccaagaatcatgtagatcgatgccgcaaacagagaaggagcaagtagaataaagagactttgcaaggcgtatggcattgtcgagtaatttggggcttcatgggcgttgactgctcgtgccgcatatccaatggcttcaaataaaccgccaacgacgaaggtgatgaagaatattgtcttatgcttccaaacgaagaagatgtgcccgcagattaggaagacaaaaagaagcaagaaaataattgcggctgccagcgagggtgtgtagttgtagagactgtaaccggacattgtgaatgacaaggatggagttgcgatgattcaaaggagggaaagtaacgagtgatttagtgaaaaaatcttgggagaaacgctcaatggatgaaacaactgatctggaaatcgaatacttatttgtatgctgagagaaatatcgacatataatcaatacactatggagttatttatggacattcaaacactgggggataatgagcggagaatattttctctcccaggcagctgcaataaaatgctaattatggagcttcagagcttgtcttcacaagcatcaggctatatccaactgttgtagttcggcagaggaaactggctccgaaaagtccgaatacggacacgaaggcccactttccacatgagtacgaaatataatagtatttttttctacttctatgtttatgcggatcaaactgataatttgaactcatgataaacaatagagtaagctgttgcgaaccgttagaatagttgtatgttcgtgggatagttgattgtatgcctcacaacaattgcaaggtgattgtcattaactagaatccacatttcccagagatctagtgtaattgggactcgcatgacaatcctggaaagcctctagaggtgttaggcatccgtattatcttcttaaacatcatcgttccaaggaaaaaaagcggcgcaatgcgaaacgctccatattgcttgattcttgattagtatttttcacgagtactcaagaaactttgaaaccatctagttagaggtatcctgatgccaggtttcaaaatttgcctccaatattcctataatggtcagcaattctgctatcatcgttatcgtgctcgtgtgtgccctcacagccgtctcactcgcggcgggtatattcactgtcgttaaccctgccacccatatgctatcggcaccgaacccagagcaacaaaagtatatgcgagaagtcagaattaggcaatttcgtcagctgcgacgagaaagaaatttcagacctgagatttttccaaggtaagtactagctcctaccacactctgattaatcttactctaacaatttggcagagcaatagtgaacattgaaagccatccaagcctggaaagtacgaacgagccgtgaatcacgagcttttttattgcaattgaacgagtcaaggaggtttataatggggtctacgacaatgaagtgtacttaaagagataatcttgatacgatcagagaacaatcggtatttgagacttgcggacgtaagtacgttttacttgctaggaagaggctactatctatataccttgcattgctagtctgctatcaactcttttcttggtaaggctgagtgcatggcgagttttcgtttctagtagtccaatggcttcttcaaatctactcatgccacactagttctaaaactgcgagaaaatactcttcaacactttatttagtgttggcaattccccgttctttattcttcttccaatattgttgttcgagatcacgtgacccctacgtacgcaatatttgtcccagcaatagctagtttctcttttcctctctacgcaaactcgatattttccaagagtgtctacattatttgtgtggtattctcgtctgtatctctaactttggctacaaggttaaagacaaaactcgagcatggccggtggtttccttccataccacgaacctggaagtatgtacacaagcatataccgattgatctctgctcatttcctcactaataaattactgcagctgtcgacatcctcattatcgtttctttcttctttttcctttcccttgcaaaatgggtctccgcgacagtgatccaggccggaattataggtcagatcgccgtcggcatcatttacggagtaccattggccaatatccttaaatatcactggcaagagacttttgttactctcggatatgtcggtctcattttgatcattttcgaaggtaggcggaaatttccttcttgcctggcttcttggcctcttggcctcttggcttcttggatactgacgtcatctatcctaggcggtcttggcgcccgtgtggacatgctcaagcagaacttcactttgagtatgataagcgccgcaactggagttttatttcctattggactctcataccttttgctatatcttggttttggatatggtttgttttatttatctcaattcctacggtcaacagctaacatggactaggtgcggtcgagaccttcatcatcggcgcatctctttccgccacttcactcggtaagctatctttcctcgaaattcggttgactatgtttcaattgctgataaatattagggaccacctttgctgtgatcagctctgcgtccgactcagtcaacctcgccgagactcgagtagggtcagttctagtaagcgcggctgttatcgacgatgttgtaggacttgttatgttaaggtatgttacttatctgaacttgcataaggtgcgtagtctatttttttttttttagctaactgtctacccagtgtggtcgcggatttgggcaaactatcaggaggtgatagtgtcaacctgggctggctcattgggcgtcccatagtggcatcgataggcatggctgccgtaacacccatcgtcaccaaatgggtgtttgcgccatttttccgaaagttcgttgaataccgctttgcacgctacgaccatatctccaacatcatcctcatgatccttgttctttcggcttttattgccatcgctggctttactggaacttccgtcttatttggtgctttcctggccggtgtatttcttacatacataccgagcaagcaccccgagggaccgtttgttgtcctgagccgcgaggaaggcgagcgcgacgaagataaaagccccactttcattcatacctttgagaaatacctgttaggaccccagcagtacttgatggaaccattgttcttctcaagtatcggattcgcgattccattcttggagctgtggaccggggaacgcatctggaaaggaattgtttacaccctcttgatggcttttgcaaaggtatagatacccttaaaggtcgttcctcggcaatcaaactaacatagttatctagtgtgttgtcggaatctgggtccccatatggcaactcgctttggggggtaaatctgacacaaagctacacgaagagcaggaaatacaggggcaacagaagatcgagggcaacaatcccagcgatgaaggccaaagcgaccaagagaaggggaagacgtggaaacggacctggctggccacaatacttttaggatctgcgatggtagcacgcggtgaaattgggcttctgataatcgaaaccggatacaacgaaacttcatacgttagtaatgaaggcttctacaccggcatctgggcgattcttttgaataccatcattgggccagttggcgtcggtctcctggttcgattctacgcgcacgagctcaaggggggtgattggggagtgcagcgtactccggctatctcgggctatggttctagtgaacatggggcggtatagcagcacgtaaaatgttcacatgctatcgaggaagctatataaccgtttttgtgtgaagattacacgccaggagttagctcggtgatccggaccaatagcggaaaacggcccgcctgggaaaaggcaagcaaaacaagaaatctcctgttagggagaacggggaactttatagaaccacggccgggcaagcactgggactggtggcgctaaaccgaaagcaaccgtcgtaaccgtccgatatggtgtatgcagtatcgtcggcgacaacgggcaattcaagccaatttccttctcgtcttggtgtggagaggagccagagcttattcctttgttattacataaatcttttgttttgattagggtaccgtaaacgtttttgagttttgtttaattcggttctcttagtgttgaacgcagcctgttttaaccattccagggttgtggtaactcttttggcaaacctgattctgtgagtcactagacctattggttttcccatcaatgcgggggaagtccaaacggtaaactctagctgaagcctgaacgttgcattatccagtaggaatgtccatccccacgtcatcgttcggcgctcctagaacagaactcgtctttctttaattaaaccaactcgccggtacctggttgtttggtacattttcaacccttcgtctaattctatgtcggcatttgtaccacgttgcgaaatggttggttggctcttacatctattcatccttcatctacgatgattaccctcctttcacctcatttcgtacttccagcggtcagcgaggatgacatggtgattgcttcactcgcatggggcttcacgattggctttgggtggctcactacctggacagcggtgaagcagactctgcacatatataagagacatggtcgccatatcttccataatgcctatgtatggatgatatggctcgagattctagtttgtctcatcttcagtgtgctctgctggttatacctgaggggtacgattccaccaaggtgagctcgaaccaatccgagattacggaaaaggagtcagtgctgaccaaattgtcagctttgccttctatttctgcattggtatgtccacttggggctcttattatcttatcagaatgcttattttgcgaagttactacatgggccctgcaagtaaatggctctatgcaaccttaggaaactgattaatgatgcgaatcttttcaggtccaatttctcctacaaatcatcatcaatcgttgtgcaattcttcttgtggatcgaaggaatgcaaaccgtctgaaggtcggcgttgccatcttaatcaccgctatcaatatctcagtctacgctatttggattcccgcacgtctgcaaatctccgaaacttacatccgggtaaatgaccgatgggatcgttgcgaaaaagtcatctaccttcttgtggatggagcgctcaacttttatttcatacggattgttcgatcaagcctagtgtcggccggcttgggaaaatacaaaaccctagtccatttcaatatcggcattattggattgtctcttggtatggatgtcttgattatatccatgatgagcttgaataatacatttgtgtgagtaaagtcctaaaaaatcaaaaggaaaactgctaataacacccttagctatatgcaatttcatcctcttgcctatatggtcaaactcaacatcgagatgtcaatggctgatcttattgggagaattgctagtgatcgttcttctgtcatcatctgtaatgataccttggagttggctggcgcgggggacacacaagaggttaggttcgtctccctctagccacaactcggtggatgcacaatacctgtattcaaattatatattaatcgtatctaatacagttcaaagaatgcttaccgtatattgactgagagccgaggctatatatttactgtgtggggcaagttggtagacatccttagaagtcctaccaagtattgactacctgcggtatgcacaatagggctatatctatgtataaaaggacgttatgctgaaattctagcctttttgcctgtcaatagctatcgataaacatttttgatactatatgtcggaatttttcatgaatagaaatatatatcttcgtcactgctgtattaatttcccacaatttcctcaagtgattagatttcatatagaaagtaataatctgtaagaaagtatggaagaaggccttttctggttggtatgaggctatagtacggatggcctcgcggtgacaaataaatcgacgagcagcgtctgcgtctgtgatagattagtgtgtgaagaagctaggggcaaacgtggctttagatactgctagttgcaacgctatgataggaaatgattctttttagatgcttgtgatatttagggagctcctaaagccctcaagcatcggacacgcactagctacatcaagcaaaaaccaaggactaaggatctttacaagtatcaacccaccactccggatgcaatattcgatcgcacacattatctctacaacattccttgccttcattaaagggcttacgatcaaatagcaatttgcggttgattgttgcattcccattcagaatttggaccctgtaccactccgccagtcctaaagcgtcggcaatgactccatcctcggtgtcatgcgctttggagactggtagcgagatacaccaccggaattgtcgatccatgggctcaggagtaaattcgaacttcatctcccgaatacgttcaattataaggcaaatcaacgctccgtcggtgcgaagataaaaatggtccttggtagtaaaggttatattgacccacatgttttcgggactctcatctacacctgggccgtggtggatggtaatgtaatatgacattccgaagcccgtagaatgttgaggggcttgtattctggtgccacctgtaccgatataattttggtttgtcagtgagctagatgctgggaactgaagcccaataaatacgggactagccgactataaaagaatgtttccccctaagacatactgctttggactcttttggcgagaacaaaggcattctattctaatcccattgttagatctttcatacgtttaaattagcagacaaagacttgaaattaattgcatttttcatttttttctcgccattctatcaggccccgtagtgttctcgggagtagcgttggaggccatttctggtgatattgggtacaacgacaaacaaatgggctacagatgtgccatctttcccctcccatctgcttctttacccttgcttggtgttcttctcgagtttaggagggccgccttgggtgagtttgtagctagtgctagaaaagtgaaaggtcagcaaaaacacatggaaacagacagcgcggatggactgactactccctcttcatagacctcggcctacgatagttagcatggaaccataactagcagaaagaccgatagacatacggacgtatctgatcaacggagataccgggatacttatcaccttctttcttcaagacaagttagcataaagtaagttatccctagtgtatagaatactcactaggtgatactggcgtatgtgtcgacgcagcattggagccgggtttccaatcttcgccgtcttttcagtcttccatgagcagtaagggcaccgctttgcacagtccggaatgaactaaacatggtacgtgtcagtcaaatgaacagaaggttcagacagtcgagagtcttacaagaatggcatgctcggccggccatgtagtttcggggtgctgtgggcagtcgcagagcttcgcgttggggctggtattatgttagccagtagtataaggtaatgagcttgacgtcttatggtgatacgtacgcccatgatgttggctcagtaggacgagagcttttccagcaatcgccgtgtggccacgaagacggatctggcaaagcagtcgccgtaccagtttgggcgtttgaggcctcggtatcaaccagctgactaggctgggaatttgggcaggaatcgccctttggggtcaagggcgactccatgtcgtccgtggggttgcgctccatttggtttctacaaggtcaccatgaagatcagtatctcatgggtcagaggaagaatgaaagaagatagctggctactgaccgtggagactgatgggtggggtatgtcgcgttgcaaaggtgaaagtgagaaacgcggattgacgggtgcggtgtgtcgcgttggaaagtgaaagtgagaaacgtaggttcaagacaagtttatcagataaatcgcggttaccgttggcaccatgcttccatattgtcggattctctcccatcattagttccacttctcgcaaatttggactacttgtgcattctacctaactaaaagatacgtcttgtcacaaatttggttcggggatacgggcattttcgaagattttggagttactcatatctttcttgatgagtaaatacccaggtacagactctaccgtgagaaagcagaaagtgacactcccagacctcagaagtgagaggaaaaatagatcatactcgtatattaaagtataactacgtacgaagggtgaagaagaatcaccgagtagcaactactagagaatatatatctattacatttcgatcgtatccacaatcacattcaaaattttcgcgcgatattcactcctggtcggtcgttgtaatagtgatctctttcgaaacattggaagtgtgtaccacatgagagagtgcctgaatttgctgcttgtgttgaacagaaattcgagtatagcgcacgataatcccagttcccatcagtgaatagcagcccgacttatttcatcctatgaaatgcatatgtagggttttagtagatcacgttcaaaagtgacgtcacctgatatattcgataagatctgatagtgatcacgtgactcaccgccctctttgagtcagagtgagtcaaaaagggaaggaaaggaaaaagaaaaggcaaaaaaaaaaaagatcccccgagcgatttccccctctttatgggtcattgtctaagcggggctcggcgattcactgccattttttctccgttgcgttgcccctctaaaccttcgacttttccgattttgagacgcgcattcggtacacgaagattctcaatcatgtccgcagcttctcttcctgcctctgttgaggctctgtcgctccaatccacggcacagaagtctcaatttgccggctgcttcccgacactgaacccgatggatatttaccgccagcacatcgcggaggagttgggcaaagccgctggtatcgattctcagaagatctacccgcggattgcctggactagtactttggacaagggtgatctttcattgccggtatgtggcggcatatcctgggcgcaattcgcatgttccgcatgatcatgaggccttggactaacaatgtcttattgcgtaccgttaggtggcttctcttcagatcaagcaaaaccccgtggagcttgccagggatcttgtcgccaagttccccgcctccgaccttattcaccctccaactcagcttggtcctcacatccagttcttctgcaaacgtcagccattgaccaacaatgttcttggccgtatcctgaaggagaaggccgcctatggaacaaatggtaatcagggtctgaaggacccctccgacccctccaagggccagaagaagatcattatcgagttctcatcgcccaacatcgccaagcccttccacgccggtcatctgcgcagtaccatcatcggtggtttcctcgccaatatctacactgttatgggatggaacgtgatcaaaatgaactacctgggtgattggggtaagcagtatggtctgttggccaacggcttcaagcagtttggcgacgaagaagctcttatcaaggatcctatcaaccacctattcgatgtctatgtcaagatcaaccgtcaggtcagtgaccaggagggacctatcaaggagctgaaggaacaaatcaaggcaaagaaggagaagagcgaggatgttgccgagctcgaggcacagcttgccaagcttgtggatgtgagcgaggatgagaaggcccgccgctactttaagagtatggaggacggtgacccggaggccctcgctctctggcgcaagttccgcgatctcagcattgagaagtacaagcagacatacgctcgtctcaatattgacttcgatgtttactccggtgaatctcagatcaagtctgagagcatgaccgacgcgtacaaggtcatggaggaggctggtgtttccgagaagtccgagggtgctgttattgtggacttcaccaagcacggtgccaagaagctgggcaaggctattattgtccgcaaggatggcactcctctctacctgactcgcgacatcggtgccatcactgagcgtgataacgagtaccactttgacaagatgatctacgttgttgccgctcagcaggatctccacttggctcagctcttcaaggtcactgaacttatgggccacaaggacctggcctcccgttgccagcacattaacttcggtatggtccgtggtatgagcacccgtaagggtaccgtcaaattcttggatgacatcctgcgcgatgtaggtgacaagatgcacgaggtcatgaagaagaatgaagtcaagtatgcgcaggtcgaggatcctgtgaagactgccgatattctgggtatcacctccgtcatggtgcaagacatgactggcaagcggtatgtacaaagtgtttttctttcccgcctactcccgtatatccgtttactaattgttcgttttctttcagcgttaacggctacgagttcaacttggatgccatgacatccttcgagggtgacaccggcccatacctgcaatacgctcatgctcgtctgtgctcgatgacccgcaagtccgagttggatgttaatgagctagttaacgccaactttgatcttttgaccgagcagcatgctgtcgacttgatccgcctgctggcccaatggcccgacgtactcctccagactgccaagactcttgagcccatcactgtcctcagctacctgttcaagatgacacacatgttgagctccagctacgatgtgctcaaggtgatcggtagcgagccagatgtcaagcaggcgcgtatggcgttgtatgcctcagcccgccaagttctgaacaacggcatgcgtgttcttggtctcagccctgttcagcggttcgtctttcccacccttattgaagaagcaatcactgacttatctgttctagtatgtaaattcggcttattcggtcgattttgctcacttttctgtgtggcgttttactcagtatttctaagactgttgtctctggtataccttgattttaatttagttgcattgggcgccaagagcgggacgaataaaaatggcatcatgcctctgcttttaccaatatcattctcagatttcccctttcttctcttctcttctttctttgcttttccgatgccgtatcatcaagaagaaatgggggcgacccccgacggggtcggggttgggtctgaaacccgtctccatattataccacgcactcctacatggcagacacgctattgtttgtgaatttcatctgggctatgattcttccaagcccattgtccattagaggacgggtctccctgatcggggactatcgagatcttatgtcaggttgggcttgagttccaaggttgagccctatattcagccttaaatcggggaccaacttggacatgtaacaaggatttcgtctcgacactagacaggggcttgtaagtctatgggtttggttattcagattatgggtgtatttaaaattgtagaacttcggcccgcgaacctggacatgggttaggttagattccaattctctcgtatcggccgtgaaccgtctacattatcctgcagcacaggcgatccctcaccctgttaacgcacccagcaccctggacctggaacgcaatgacactggtcactccttgatgaaccagaccgttcaaaatttctcgtggcagggtttaacggttaccgtcaaggatcgtgaaacaaaaaggtcccgtgatttggtatcaagtggtgatacgtaacatgggttagatccttgtccataccccatatcagaactagcatattgatgctggttctacaggggagctcgttgctctaatgggcacgtcaggctgcgacaagacaacacccctcaacgtgcttgctcgacgtatcgcatcagccggtgcgaagtttgtcggggagaactctgtgaacagcgcataaaaggacttacgcaattttcagcgggtgacctcgtacggctatagagagctacttcagtggcattggctatccaatccctgcgcaaactaaccctgctgaatttatcttggatactgtcagttctgattttttttcagcttgaagaaactggagaaggaacgggtcgtggtcattcaagctgcctaggcaaactcaaacgagacgaagtcagcgaatacactctgcggaggaacatcttagaagagcctttacgaaagaaaatactccaccgggaatgacttcgactactatagctctgctgaatcaatcatttatcaagttctacggccatgccattgcttgtggaatcagtgtagctatgtctttatccatcctaggattatagccgtttatcaacgtcattgtaggctttacatgtccttcgcattgaagtcaacctcacaatcctccccaacgacggcagcagggtgacaatttctgttctttcaacgaaaagaatgtatttcaacacaaatactaagatagagcgtagaggaggggcaaggaagaacggagcaaattttcggatgatagaactttccgtcgtacgatcggccaagtcatagaatacatggtcgataagcgggtcccatacgcattctattcaacggatatgggaaacagccatgcttcgatacgtctgggctaacggaatgttggtgagtgctcgataacccaccctccgtcagcccagacgtatcgaagaacgattgttccgtataagttgaatggaacccatatagagcctgcttgattagcatggaccccacgacttggccgatcatatgacggaaagttctatcatccgaacattggcttcctgtccgcaattccagaggtgaagatcaggacaagtaaagaaaatccaaagtagaatggtagaggatggcagactagggaaacctagtaaaagagtgccaaatgtggaatcaatggaaaggaaatgaggttcaaaagtgttagagaggaatagcgaggtgaaagagaaagagatgagagaaatgctggcatttatagacacgttcacgcttctaaacttgactagttacttctgagcgatgcctgatgtattctagatgattgctatggcattgaagcactgccgttacccacacaatttgatgaacagcttcggcaaggacgcagagtgggcaggggtcgctcaatgaacttgactcttggaagaatctaattcacttgtgtcatgagtgtcaaatcagaaaataaaaaacaagcatagaaagaacatgatctcaagagttcatttcaacgcgtttgtcaaatgctagcaaacgggcaaattggtgtgacactattggtctcaagctttctcattggatatttctcattagacttccctacctctgtacgtacccgttactttcctgtcacatacagcaggagccttcttggcttggatgatgtggatattcctccttgtggcagctggatccctagtggtcctcataacatcgatattcccaacctttgtaatccccttggcacctgtcacatccaaatagcctttggagtgtcggagggtttatggtcatgcagaagtttccgttttggaaatatgtgttttactgcatcgattaccaggtatcctgatgcacttcttccagaagcttattttgttgtcaggataatcactcattcgcttgggatctgaaataggtttatgtactccatggtatgatggtcaatgagctttctgagcgaattacttgtggtgccgattgtcgatgtatacggtttactaacctagaggatcagtgtcttatttggggcactgaagtgatataatcgtatgatttaggaggccgaacaaatcgagcagccttggagatactctgtgtttgactacgctatgggtactgtcaatatcaattagtttgagtggacgcaattgatagaagatggatttgcttccacctggacaaggttcggaaacttcatccggaatggcagccaccaatctcccgagaacctaaagaggtccccaatcgagcaagctgttgtatattccgtagcaccttgatagtacgccgggcttgaagtatagccacggggacacttgactcacatggcagctggctttcgtatcacatcagataatgctgcttacatcgcgtgccgaagcctaagtcgtcatgaaaaaagcctatctggagctgacgaatcatgtcatctacaacagaaaacggggtgatgcgcaacacaatatgcaagtcatgtactccgtataccgatgtactactatgtacaagaaccttctataatgtttctgaagccgcgatagaagtctcgcgaaccgacaaaggaatagagttagactgagactgatttcccctcatcttcatcgtcgaagcaccgtttatcagtaatcatgaaagagcggtgaagatttcgacttcggggagctgatgccatctcgcagaacgaagcaagggggtggctcccttgaccatgtttgagttcccctaggtgagtcaatgaatcactggcggcagatgtcaacgtgatcacaccatgaagtgatatgcgaggaaagcttgttcgctgtttttccatgtccaagtattcagatatttcttgttgcgcacagcatgttcttagtactccaggtcccgatgcgagggtctatattggtgaagacaaaactggagccgcatggagatcctgagttatatctggagcggagcccttttcctggtttgatctttcagccgcttaagctgaagatatccactccggcctaagaggattttgatcagcccggaatacatgactagggtccaggatatattggatgctatcggctacgtatagtttaaattggttgttgtgagctctaaccttgtagtgttttcattcccacacgtgcggagtaaacattcctcaaccctcttaatctaagatgcaagggtgaatccgtaagggcaatgatagaccgtccgtgctgcatgtcataccgatctggccagttctgcctagtgagagaaggtttcggccaattatttcatcactgggtcgatatagtgcaccatgtatagagtacttcaaaactttagtccatatcgttgaaccgatagcagatttccatgggtttcccaccagtgtgcgtcatgaataagaagtatgcaggcggagaagagccaacgtccaaagatatcctgccacatggaggggctctgactacatactaatgccatgcagcgctcgtccctcttgtgcttgacatctgtggtttctatggtagaagtaaattgagtcattgcacggtggcgatggtatcaggacacatacaggtgtctgcctacagtctacctaacaagagagaatatggagtagccgtagttacctagtggtgagccggcttgcagtgtcatccccaccgacatttccccgtgtaccggatacattgtcattgtatttgaggcctgcattgaccaatgcacagaaaaggaaatcaaacaacaacaatcggagcgaaggagaatctagattttccgagaaccgagccatagccgacaggaacaggatccttttggattgacatggaaaacccttcacggcggaggcgatcattgggccgcaacgccggttgggcgttggatgtgggatgcaattagggagaaataggaatgaggaatgcgacacacgaaaatgcagaacacgggatgggaaaagaaaagggaaggaaggaaataaagtaaataaagtaaataaagataagaaaagtcaagggacaggtcaaccatggatccccagcagtcaaaccaaggatttcccctccagcgggtcccgagcttaaaagcacaaacaataaagaattagaatccatggatcggaaacaacatattctatttaagtattgtacaagatacaatatacaatatatacaatatagtaattattctaattattctctgctccaaatacatgtaaatagataaatacaaatgcaaatataatataaaacactgatgacgctatcccccactttcttcttttttttcttttgtgttgggtaccgagagcctcttcatgaaactttttttttcttttttttttttctaatcctgtgtggtcctgtacctgtaccttcgggttattcctcttcctgctcgttctctttatggtctctatactcctctgagtcctctccttttctaattatctttccctctctccgtccttctttccccttgagatctcaatcaaatcacccctcacttcgttgttatttcatcgctgcccatcgactccactctccccactgcgttctaagaccgtcaggcagaggatcctaaattctcaacccaacctctgcagctgcagttccttcaaccactcatcggctgccagagaggtcattttctattttcctccttcttcctttgacccaacgcgtccgcccaactcttagccttacatcccacttcgatggagacgttgcgatttgaaaagtaccatcttgctccctccgcttgacagaacccgtcgcccgtcgcctgccatcgcccgctgcgatcggcaggtccgcttacttgtttgagtggcccacttgggttgggcactggggagaagagaaagggaagaaaaaacggatccatttggtcagatctacggggtcgagagggggggaagaacaatatacattctgactcatcgtcaaaggagcagtggcttgctgtaagttgaatatcgctggagccctgtgggagccacccacgtcgcccttgtcggaaacgggaccaaccctgtttttttattttttttttttcgctagacacccgatcgccttgcagcccacataatggccggtaacggcccccggcctgcctgcgtcgaagattacgacgaagaacaacaacacaccctacccgacaccagactttcggccattattgctgccaatacagctgccaaattatcctccaggttggaaagattccaggagccgctgatcgacggtgccagtgactcaggttattctagtcgcaccgccgctacggttaatagcacccaatctgcgccgtcgggcggaaaaagccccccgatccctcttaagctggacacttccaagcgtaacgacctcgccaggaaaagttcaaccagagaacgcaaggacaaagaacgatctcgacccccgcgcgaagagatgatggttggtgcctatccgggcgctgcccatcacgctcacgtgccccggtcgtcgtccaagtctcgtcgacgagaatctgcccatatccaatatcacgacaactattacgactacggtactcagtaccatcaatcaaccccgattgaccaccgacagaacgactactcctactacgcccagccacgcccacccatcccagaatactcatcgtccccgcacaatcctcgttatgcccccggcgccatagagaacattcatgtcagtcaccctggtcgacccagccgctccaattcgtatcacacctataattccaacggacgacccatgagtttccacggtatgccacatggaatgggttctggaatggcatctccgatgtactctcagcacggatacgatcatggccctccaccagccagctcggcatacatgcaaccatactcgtcatctccatacacgcaatcttcttactatgccccatcggcctcggactacctcccatcggagtatccacgagagaggtccctgtcccgggaaccatcacgccgtcggtcctcatcgatctatactgcccccaacccacccatggactctggggcgtattcgccatggtttgatgaagatccacccacggaccactattcctcgcgagatgttgtccgtgaccgtcctcccccaagacaacaggaacaggatgaagactactatcggatgccaccgccaggagctaagcccaagcccaggccacagatccaccaggcgaagcgaccagagcggccagacctaccgcggaagatgcatacctcttcgggtattgtcccatctcaacgtctcccatccaggggcatagatagagaacgaggcatcgacagggacagaggcatcgacagggacagaggcatcgacagggacagaggcatcgacagggacagaggcattgacagagagcgaggcatcgagagagagcgaggcatcgacagagagcgaggcatcgacagagagcgaggcatcgacagagagcgaggcatcgacagagagcgaggcatcgacagagatttggacatgtcggaacttgcagctgccttaccggtggttcaagaccgcgcccgtcgtcgagtttcaagggacgccccgttgccagatagagcccgtagcctacgagatcaccgacgatccgtgtcctaccaggatgatcgacggtctgctcaggtggccgtggccagctctcggcgacggaagccaaccgagtactactacgatgccccatccagcgccgccggtgatctcgaagatcgcgagcgtgaagccgagaactatcaggcagcccgatccggccgaacctcagcgcccgcattacctctctccgcggagtccttgctccctaccaaagcgtctcaccgcaacgggagcgagagcggcagccagaacagtcggtcgagcggcagccgcggcagtgccacggcctcacagaaggaggatgacaagaacatgaccctcacgttgaacggattccaaattggatttgcacctgaagcagtcgctggcaaatctattaacattcgtgctggggagactggggctgtccgattgaacatcggtggcccgcggccatccaagcagcgtgtgaacggtaccagctctgattatgcgggtagctccagccgtcgggaacttgaagatgtggtgaggcgtccgcgggatgataggcggtcggaacgacctagtcgtcgagacagccagtcgacctacgggactactcgctaccattgattttttacccctgttagatgtgtcattttctgtgtttcttttcttctatcatggtcagatattattttttgttgtgattccatcttgtgtctacataaccatgtggctggccttgttcatttttcaaaagtttcgattgctttgcgttttttttttttctcttcttctttgggatcgggtgcttgtgcaacaaaaaaacaacggggattacctaacgcgaggctctgttgggcaacttggggaacaggctggactttgtcatgaggtccagagttttctgttgcccaatggtctcgctaaaatgggaggacttttgtgtgatttcatttgcaactgctggctcgatttgctttctttatttgtgtgcttgggcaaaatggtcgggcacaaaccccatgatgatgtgtttattatggcgatatgattgtacgattctgatgacctgcaatgacaagtctgatgtgctttactttccgatgtcttctttttgtcagcgtttcttgtatagcctttcttgttgggcccgtgtctttctcctggttaccttgttcgcgactccgagtggcggagagagattatacccatgtctttttacttgtcatgtctcaacaggtcatctttttctttggccatatctatgattttatgtgtcttggtatttggtatttggtcccgctgggagtctcgtagttctcttcttgggctttgtattcattcggttgatttctgcagtgttgctgatcttccgtgttctatcgtccatcggtcttgatatattttcctgcgtttgcttcttagttggttttgataccccgcaagctgtctgggcgtgatcacagctttcgactgtgtatgtctctttcggaggattccagcgggtggcatttgtcgacttgatataattgatccattattaaatccgttttctagcaaagggcatgtttcagatttaaatagaagtcaattgcgatcgactctttttatagatcgacccacgggtggcccaactctacccgtacacggacccgtggacgccagtcagtgtgggggatgatgtaatcaggttgcccgtgacaaccattgtaaacaccagtcccagcctcttctctccaacctcctcaatttcatgccgaaagtcaagctgaatcatacatttgggttgatatttcccaatcttcttatcttaacatcctacgatctagacactgtgcttcgcttttgcccacattctgcacccgcattctatacccacattccaggtgtcagagatctctacctacatctggtgttgatcacttgcctcaatgtatgttcatgtacctcataattcaatcccaaggatgccaaagtactaacgatccgatagtgagtccagtcttgagccgggtgctcttggccactctaatactccaccatgcctccattttggccgaccggaccctccgccgacattccaggaggaaccgttgacggactctatgtccgggatgtcagcagcgagaacatttctaataccttatcttcggtcgaccctaatccccataagctcctcccacgagactcagacgactcggattccacgccaaaatatggcgcaggcacggtcgacccgcacagcatcaagatgcaaggcctgatggccttgtttgcccttatcggactggcatttgtcataggaggaatctggttcttcttctgggctaagaacggcggatttgtctggcgcaagggcgactgggatgactacaagtccaccgttctgcgacgaaagggacccgacggaaagactctcagtaatgccacagcgagtaccaatctcggtggcggaagtgttgtcggcaagggctacaccgacgacggatactcgtttacagaaggatcatacgacgacacagcgacaactgtcacggaggagaagtcacggcgcaagaagttcagagagaccgctaaagagaagcttctccggcgcaacaagcacgagcagtgggaaggtgcagatgatgccgacgtacgcgcctaccgagcagaaaagcccgctcgcattggtggcatgaaccgcgaagccgacggaacctacaatggcagcgactacgacacctccgccccgcctacccactaccaacagagcgaaatgagccatgctcatgacttcgcttacgagcagccacgacgtcagcaccgtgatccctccggcttctcgttcacccaaggcagtgaggatgttatcagccaagttaccgatcagcctcgtatccgcgacccatcaacccgccgccacaaccgccgtcgcgaacgacgcagtgagcttgccctacccgccccaccttccgcaccttcatctcgtactagcagccctcgcaagcaccgtgagcgccgctctgtgccccacggtcacttcaccgagcccctggatttctcatctgcaggatcccgttccgaatatcaatactccaacgtggacaccgaggattcaggtaccaagagctacaagcatccaattcctggtttgacgaagggataccgccgcgatggacggagccgtcgtcgtgacagtctgagtgatagtgagggcgagacacagtactcatgaattacgactgcagatcgggctagggtttgatgtacgagataccctacttgatgtatgggatttgattttgaacgttcaacaattattgggttatggaaatagcgtgctttttacggcaaatgccgatcgacttatggatatggatatgggaaattgctttggtcatgtacataatgaagagaatcacgatgcaaatggataatatgtctgcactgtagtaggtgtagatatttcatttgttgctagccacctaggcatgtttaaacggtcgcttccgagttgtccgacatacactttagctctgcaccatgtacttcctttaaaccacaacctgaggttgggatacacacatacatcgtttcttgtgcatattcaactaccacccgtcccaaattatcgtcaagccaaaaacccctcgttgttgacgacatggcttcctgtacgtcatcaacctcccaaatccacaacatcctaatccccacaacagcaccccaagaccgccgaccacttatcatctccggtccctcaggcgcaggcaaaggaaccctgatccaaaaactcatcgacacacacccccacacattcgaactaacagtctcccacacaacgcggcaaccacgccccggtgaaaaagacggtatatcctaccacttcgtctcggtcgagacatacaacactctcaagcacaacggggatctaatagaagacgccatgtacaccggtgccttctacggcacgagtaaagcagcactcgcggaaatactcgacaaaggtctcattccgattcttgatatcgagatgactggcgtgcagcaggtgaaaacaagcgggtttgatgcccgctatgtttttgttaaaccgcgggatcttggtgtgctggaggagaggcttaggggccgggggacggagagtgagagggatattcgggctagacttgatcgcgcgaggagggagcttgagtttgcggagactgcgggtgtttttcagaggattattgttaatgatgatctcgggagggcttatgctgagcttgagggttttgtttttgggttgggctaggtagtggtgaggctcattggcagtgttcacctattttcgatttagaagttattattggaatgggaagactctctccaggctacaagaatgcctcaccaactagggaggtaatcagccattgaggctacatttgggttcatagtcagaggtgtagtccgccggcgaagattcggtgtccggggtaataggttgcagctgcgccaccgggtcaatttaatacttggatatggtctgtaatatttctgaacgtctgttgtgattgtactctacctgcgctagttatgcgtcctgtctatgacactcattttcaaaaatgaaataagacgctcaggttgttgatggtgtgatttacgttttcggcagttatgatattcagcgtggtccgtagtacacctgcatatcattttcttcatcacgttcctgtcgaggtataagccgcatttcccgcatttttcggatcagatagcgcttagctgacaggtactttcctgataggctttgccacgttggcagtgtcacgggttgattcagggggcggcgcaggtactccataccagttggttggttatgtatttccgggagggtactaaatcaggaaggatggcacggatgactcggtcaaagcatcatattcgttctatccatgactcgcttttggtggcttcgtcggtcttgtatgtatagtccagaaaagtgcctattagcgctgtggatgttgcttttggagaaagaacacctgaggaagtggcgataaccgttgcagggtttccgatgctgtagatctcgatgctcgagcacccctccaaccgtcaagttagagcgaataagatactcggaaggcagacttcacttctagttctggcataaccatctgccgtggacggcggctacatagtgagaccgtgatgagcctcgatcatagtacatattgatataggtcaagtcacctgggataaacgattccatacgatgcctggccaagatgccattgctaatggtttcacagtaaggagtacccccgtcatattccacaacggagattatagaccaacacattcgaatattgctaagcaaggttgaacagccctggaggaaagaatgctattgataaacccgataatttctcaagagaagagaataggagagctttgtcctcgaagctacaccacatctgggggttgtaaaaggcgcagttactgacgctttgatgtccaaatcgaaacctccaatgacccttactccgtaatccacctgcattgcattagcgcctgcgcttcaatgtattattggctaccctgaatgcaatggtaaattgtgagccaaagcattagaggtatatcagccacaataagttaagcccctcattgacaggtctctcattggattctacttccactcagcgatcatgtgctgcttgccaaagcctctcccgcgagtcagcgcttgagaacaaaccaacttgatccatatcatacgcgccatgcatatactatctctcttaagatattggtgatgtaaacggtccgagccgcatggtactggtactggaggggtgtagtagatgagcgatatagaaaccccaaggcttttatatttatctgcctgatcttcctcgatttctaatttcttcctcttgtatgtaaaagtcatggcttcgaactgggtacttcatcatgagagcaaccgatgggttcggcccatctacaaccattctggtgtgcatcactggctgcatgatgaccgattgcagtaactgaccgtaacaaaaggagaatttctctacgaatgggactgcatgggtggcgagttaactcctgccatagcgggtcaagattcaaggttagtcttccattcttcttgtgtgagaagtccggggaagtaatccgtttaataaaagcgtcgcgctatgccaacgaagcacctccgagtccgcgtttcccacactcaaagatgcatacggacatcagctcccattcccccccgggctagaccctcatgcaagtcgcctaaatcgtgtacatcagcaggacccgctcgattacggccaagcatataccaacgatcatttcaatccccggactccaccgaccggataccagcagcttatcaatcaccaagtggataatggtatatacccaggtgcaggcacagtgacagatgacaaggcaagcagtccgccagaatggagcccgaatatgcagtacaaggtagccagagacacaaccggtcgcagaacagggtctgcaagcatatccgaccgtagcgatgtcactagctcgtcaagaagtgatgtatccattcccgaaatccatatcgaggatctgcagggattgagtctcggggatcatccagcctcgcatatggtgctgccctatgaggccagcagtcatagtcactgcaatgattccattcccggggatgtccaacgaaaaaggcatgacagaaaggtggtaagtagttagttttccttcctgtttcgactgattggctaattttgacatagcaaaagtcctcggaacctgcatacgtgatccccggcagtagcagcgaacatgacacacttgatcctcgtaagcaacagcctaggcccgctttatgcatatccggaaaaagaaactgacgatgattcacacgcatcaggctacaagaggcagagcgatcctcggagatttttccgagttggcagggtttgttcacctcacatgcatgtcagttgaaggccctgctgataattgattgcgatcatacaggtcttttcgatgctctggcatgagaatgcaggctggcatggaactatcgtcagcgagaagcttccctcatcgtcaagcccattcacacggggcaagtatcaagaacccatatacagtagcatccgacgcatggtagtggtcaaagagcagaagggctgctgctggtgtgtgtacgtggaaagatttgcatccagtgtcagctgcatttgtatcatactaatccatcattttagacccatcactacctatagtggccaaggcgtggcgaaagccggggttgaccgcagcaaacatgccgtcattcacatgcgaggcgatagacctcgaactgtgaaatccgaaccccggatggccaaagagccactcgaggttgatcctgccaggcctgatcagaagctagattgtatgtcccgagtgaactttggcaaagtttataccgtcgagcacaatgtgaaagttcttcccgtgggcaagatcacggaagcatctcgggcgagattcctagaatacgctcagggtgagtttatcaactaggaatagagcgcgagcatagaatttatccacaggaaagatgcttctatgtcggtctacattgcctgtggggcgatgcatgtcgacaattcaacatccagacttcctgtttgttattattatttgtatttgttttgttcaggggagcgatacgggaattatatctaacgtctgcggttatttgattttgaatagcgagttttatcatgaatggttcttcgaatttgatgacatctgtatttgatcttgaagatgggctttgcttgcaataagtcaacggtttagaacaacatgagaatatagagtcgggagatgtctgtatcatagcttggaatatgtctacctgggaggccctttatgctcactagtcaaggactttccactctgttctggccattcatgaaagattggtgtttaggcttaaatcgatctatatcaactaccgagatatattttcggctgggggtaggatatgtcacaaaaaaacacctgtctacatatccccaaataagattacagtgcggatatgtaccggacttatcatgcatcctttagattagcaaagcctccaagactcagagattctcctcgatcatttatagttgttccacggagctccgcctgaggcagcaagattatgtcatacataaaatcttccaattcaccgcccgcaataaactcaccgcccgacaagatttccgaaaaaagtttcaacttctgcagattcgatcaaggaaatatctaacacaatggcaatgaaacgcaagttagacgcaaatgatgttccatccccggaggctgctggggtggaggatcaggaattggactttgaagccctcaacctcgatcctcgattgcgccaggctctgatcaaggaaaagttcaccaaacccactcttgtacagtccaaggcgattccgcttgctctggaaggaaaagatattcttggtgagacgagcctcttgaatcgatgaatcaaaaagcagagctgacagaaatagcccgtgcgaaaactggctctggcaagaccgccgcctatgtccttccaatcctgcaagccatcctccagcagaagactgttcgtttcctcttcccccttctatatatatgtacttggtatggaaatcaatctaacactgtacaaataggccgatccctcctcaaaagccacaaccgctcttattcttgtccccactcgcgaacttgcagaacaggtccagaaagtgatcacatctttcgcttgtttctgcggaaaggacatccggtcagtcaacttaacacagaaggtttcggatgaagttcagcgctcgatgctggccgatttcccggatatcgttgtgtcgacacctacccgggtttacagcaatgtcaacaactccgctttgtcgctcgataaagtcactcatttggtcatcgatgaggcagacttggttttgtcatacggatatgacgaggaaatcaatgctctcgccaaggccatcccgcgaggcgcgcagacatttttgatgagtgctactctcacttcggaggtagatacattgaaagatttgtactgtcggaaccctgtgattctcaagctagaggagaaggaagagaagggtgctggtgtcagccagtttgttgtccggtaagacaatatcctactgccgttattatagcagttgctaactcaactccacagatgcgcggaagacgagaaattccttctcacgtatgtcattttcaaactgcagctgatcaaaggaaaggtcatcattttcgtagccgatgtggaccgatgctaccgtgtgaagctcttccttgaacagttcggtctcaagagctgtgtcctgaactcagaacttcccattaattcgcgaatccacgttgtcgaagaattcaataagggcgtatacgacatcattgtcgcagccgacgagcaagcagtattgggagtgcccaagtcgaagaagtcgcgcgaagctaaggaggaaactgaagaggaagcaaaggaggagatgggaagcagcgaagatgaagaggcagttgatgaaagtggaaaggaaaagaagccggaatccaagaagcgccgcaagatgaccagcaaggaaaaggactacagcattgctcgcggcatcgatttccaaaatgtcgcctgcgttctcaacttcgacctccccaccagctccaaatcctacacccaccgcatcggacgtaccggccgcgccggcaaagcaggaatggctctctccttcgttatccccaccgagcaatacggcaagcaccgccccacctcaatccccagcacaaagcatgacgaagccctgctcgccaagatcatcaagcggcaagccaagctcggccacgaagtcaagccctaccacttcgagatgtcgcaagtcgatgccttccgctaccgtatgacagatgccctgcgttccgtgaccagacttgcagtgcaagaagcacgaggacgtgaaatccgccaggaactgatcaagagcgaaaagctcaagcgccatttcgaggaaaaccccgaagaattgcggcagctacgccacgacggcgagctgcgccctgcgcgtgtccaggcgcatctcaagcatgtgcctgattacctgatgcctgctaagggacgcaagggtctctcgaaggatgttgggttcgttgggttctcaaagacgaagcagaatcgcatccgcaaggcaagagatcgcaatcgtgcgcgtgggaaggctggtgggaaggttgatcccctgaagacgtttaatcgttctaaaaaatagttgcatagttttaaaatctgcgggcgttttgtccggataccattgtatagtcagacatgaataaaatagtctcaatttgcgctcctgattgcatgcgtaggatgctttctttttcgcttcggtgatatacattgtacatagatcattgtgcatacagtagacttttataaataaaccaataattcctgcccatccagcgatctgattgtttcaggttcaacgtctttcaaccctgaaccgagctcgatttcgagccatttcttccccctccttatctgccgaatatgctttagcacatcacgcgcattttgaaggtgatatgcatggacagaagagttcggcaagcctgtttgcggcgtggggacttcatgagacggcacatgagacgagtcgtgggactccgtcaaatccagaaagccggggccgatgccaagccattcgacatctctccaagatctgttccactctgggccaacggtatcagggctctgggggaccccatccgggtctttcccaacccattttaaagctggtagccattcgccgcagccctcaaggtccaaccatttcaggcagtacgtcgaacgggatagctgacggagaatactcgcagcttcggcccaattgttgtcaagggcgtctggggccaagaagcgggccactgagctgcgaatccgagtagtggcagcgcttggatttcggcacggtataggccaatgggcaagcgagagatgagtcagggttggcaaatgtgctaatagattgagaagagcagtccagcttgcagcactaggtgtcgggtgtgctagagataaggcacggagttgggggaagcgtagagtctgggaaatggccttgggaatggacggagttgaaagacgatcaaccatagcttcctctcggccgttataaacatcttcatcccatgaagctggaataatctcctctgtttcatgacctgagactcccacgactggagcctgcgagatggtcacctcgtttgtgagctgtttcaaagttatccagttccccagagcatttcccagatccaatcgcacgattttgaaatccccgtcaatagctcccgactcattaaaccctgggacctccttgccaatttgatcctggtcatgtcgggtcaaaaagagtggcttcaggcccttcatgtaccctctcagtggcgggcctcttgcgtacacagcaacataactcagcagcagttccttaatatgatttggaagatgggccagaaaagggccatcatattcaagatgccaacaccagttcaaagccattgttttcagcaccagatgtaccaggctccgatggtctgggaacagcggccccgggaggcgggccaaccggtgtatttcctcttctgaagattccggcatccgatggtgcgatccttgatctcccgccggatttgtatttccagcgagccaactcgcaggcggcggaggtccaacagttggtcgagttgggcgaaccccgaataccgtgcgacgaggaccggggcgaggtcgcggtggcgcggttgcagggagctcgagtacatcccgaagagacggatgaactgagcggggagccacaaacgagcgccgagcacgttgcgagcttggaggatcatcggatgaagcactaggcgtctgtgtacgtcggaggtgactgattaagtcgttgactgacgtcgctgacgcggagccctgtaccccagacccgccatcatgacgagacccagataatgcaaggctgtgatgtgctaagttggctggctttgcgtgaaaccgctggtgctttttgggcatctgtggtcgagctgcgggtttgacgaagtcaagtgtctccgggaagctttcccgcttttatcgcttatcgcccccacatttgatgggctgacatttgcggctcaaaaatatagaaaacaaaaacaaagattggcagaatgactcactgttgctcataataaaatctatacaatgttatacaatctatacacacgggctcagatatcccgaacccaagaatcgtccttcatatggccctcacgcttgggaccctcttcgagccaggtatccaccaagccctccttcgggtcctcgtcgggcagtccgcgagatcgacgaacgtccaagacaaggttcctgatcttaaaggtcacctctttgcgcagctcgacagcttctttgtcgttcaacagttcatcactcagcacccctaggggcagatcccgggaatcagggtatttcttctcgaccttctctttcaacttttgccaccgagatctcacttctccgaatacagcatccgagtccaccttggagccaaaggtaacgctgacatgtttgccaggccgaggaaggaatcgtgggaattcccgactctcgtgcataacatcgtcgaagccttcaatccacatcggaacaacatccggacactctttcggctctaagatgagccgtgcgattccccacttgaaatagcgcatggtctttcgtggcgactggtgaatcttgccttcggggaagatatggacccacgaatttgagttgcaggcgtatgcggtaggtgccatgtgtgagtccttgccatcggtagtgtaagcgactgggaggtccgagaatggatcgacacagacattgtgccggctccagtgctgaagttcgggtaaagcgcggtggtggtcaacggggaagggacccttcgataacaagcgaatagcctctgtgacagcgggttgagtcaagccaccgaatgcggaatgggcagaacggtgagtaggcagaaccttgcccatggtgaagaagagtgacagtggtcttatctccagtcagtaaaaccattcattgaagcattcgggtaaacatgtagataccttgtctgataacaaatatcgtagcttccaaaagaccaccgcttattccaaaaccgtggaggcaaaatgccccatactaatgggtcatccattctggtattccggcgcaatgtcagccatcttcacttttgcagtatgggttatctcgatccgaggctagtagagggacgtacacgctgatatgattggatactattttcagataaatcaattagcaactgcactggcttaatgcactttccaagattgttgtgttccggcatacctgtaatcaatcctcgcttccgttgcgaaacgtcatgtcgagaatctaacagctccgtgaatgcttccttcccgtgacattcggcatgacagaaaacagaaaggaagccgcgacatagacccgctactccccacattgttgtgttggataaagccctccatgggagggatggggactccgccgttgcgctcgagtccatgatggatggtgttgaactgttatacacaatccatgaacaagaagaggctttgcacaagctactaggagcttggaaagtgataagttctccgaagagcagatgtaattgtctcaagtgtacttagtagtttaaaaaaaatatcgcgttcctggaaatcgacagattcccgaaatcacatgattttggttggggtaaccattcagtaaagcattagaggccagcattaccatttttcgataatatgactggttgaaatttaagataaacaactaagctgactttccaagtcccgagaattttaacttttcctatatcaactgtctcaacgagtaaatgggctattccatcagtaaattttgtatacattcagtgcacggaccaagtacactcccgaactccgggcacgattttctcccggctacaccctgacaacaccactaaccaacgatgttcaaatcaacccaagcactatttggcggtctgctctggtgcgtctccggcccttagcccgcagcttcagtcattggaacccaagctaacattcttcccgaataataggaagaccccgtggcgtctctcctcccctcaaaaggcacgacagcgcaagcgcctgcgctccgtggacagggtcgtcgacaccgtcagcgccgcacttgagcgcaatggccagacctccaaggctgtgacccgatggtttgcagagatgccccgtgaggaggaaatgctgccgaaggacaagtacactcttttcgataagaaggagaagagctaccggaagagcattcacagtatgttctcgtgccattcttacccccttccccccacgttgacaccaaattggtattcattactatgtggatcggctgggctaaccaatttctctaccttcagagctgcccaagtggactcgtgtcagccaacgtgtcaaccctcccggtttctaaacggatttcttcaccccgcgcatgtactatacatccgaactcgactctggcgggggacttgtcggagcgaaaaacaatatatggacaaccggagttttggctttttggaatttgcagcgcggccactctgaagaggatggtggcttacaatgttccatgattaccccagcgcttagatcaggctttcaattcaaatgcattttggcaaggatattcatttgtgtttggttccggggtatactaatgatatagatgcagcgacagacatagtggtagtgaccgtatggcagcagaagtgatggatcagtgcgtttcaaatgagggtgcagttcgaaacttgcttgggttatagatagggcagaacaaaatgaatgcaagggtttggtgtgaagagtgagcggtttgagaagaatcacgagacaaggaagcttggagctcttgttctctcaaaatcatagtttgggatcaatttcccggacgcagtacgacagcacttgttgacttgagctgccacctccttgatcctgccccgatttactcggccttcgtggagggctttgtgaacacgatatccccggtggacttgttgccaatcatcgagcttctcttgccagcctgcgcctccttcataccaggcattcttctgcgcagtggacatatcaaagccttggggtggctttggcaaaagccagcagcctgtatcgacatgaccatcgggcggttcttcgaccgattcatcatacagtgtaatagtgcgaatggcgtctcgtatgccagataccctccgctgcttgttcactgcggcccgccaggagtctatacgaggagtctgtgcgcgtttccttctggatatagggtactttggtctgggactgaagactggccgaggataaggaacgttgaatcgtgggtctccccgcatccgacgtgcatcggtggaaactcttgatacgggatcatagaccaaccatgtttctctattcagccagtggttggctagcaaggcaaaatggtatggcttttgccccggggtgaattcattgaagagccataacagttttcgatccagcctctccatcatcctgacctcccaatcactcaactcatcgacagcgcttcctgttttgagctggatttgatctgcagagcatcgagtaaggtctatgtctggccttttcccttgacgacgggacaggccgggatgttttgagtcacacataaatcgccattcatcagacaatgctggtctggctttcgaattggtcccttttcctcgaaaattacttctggccggggcggaattccattggatagttttggtatatgtccgctgttcattggcaaacagaacctgatttcctatgagaagtctggaagtgaacgatgttctatcttccgagatatgcaggcgtccttcggtgcgatttcgctgcttcttgcggtgaccaggaagagaagagctggagtcagagacgtagctggccaacaactcggaccttggcgtcccgggagggccagatgaatcccttatgttgtcaaatactccatctttgggctccatctgcagtcgtgctgaccatccacagtatctgccatgattcctttgtcgatggagtgatttaggtacttttgtgtgcattgagccttttggctccgctagctcatattggaaatcttcatgttgcatgacagattggatctgacatgagatagcctgagatccctcaccacgcgaccatggtatcgatcctcggatctggtaagatttattctgtcggtaaggtaatgattggacctgatggaacggcatcggtgcacgggtagctggctttgctgcattattgcgagaattgaacaagggttggtcatcagaactgccatcatttggctgcagcgggtccctgagaagttcctcgagaatcgaacgagtgataattggttgattattgaccaacgaagatttccgtggcagggttggtcccggtctgtcttcttgagcttgcggccgcacagaggccggcgctggaacagtctggggcattgagacacgttccttcaaagctccatggcatttaggccgcgaacaaggattccagatttcatcggcggtcggagaatcatcatagctcttgagccaatctggtagccaacgaaatcttttcggttcttgacggtgcttttgcttttccacgtcgccaggatcccaccaaatccaagtatagtcgtctcgagccgatttccacgtcatcaacttccaaatctgactgaagaagtcatgaattacccttttgtttctctcgtgtgtcggacgcttaacccagccataccatgtgcgtgcgtatcgggtgtttgtatttttgcctgctctcaacaccttgcttcgattgaatcgtctgatgaaccccccaaccttccaaaacacgacagcgattatgaatattccaatagttccagcaaatagctcaaagaatactacagagtcaatttccttatggactttgaccggtgtgtttggaggtcgtgcgggaagacgtgggataccgggactcagggagtgactttgtcgagtggctagtggcgccatttattgaagacctagatatactctccaagaatcagtaaagatatagagcacaaagtgtcgtcgggactgtcttctcgcaatgtgcaaatgagagatgttgtagagacgaggaagtaacaaggcatggaactttcctcccatatcgtacttggatttgttctgtatatattcgtcatagccattcctattttagatctttcttcctgtaatgaaaatgtaatggcaaattgtgaaatacatattctacaatgcttgaggttccatgtctatctacaccgagctatttgcggttcattcaagtcacgatccatcaagaacaaaaatataaacgtcgatatttactatttaaacatgagaaaccgcgtcatggttagactctttgattcacctcgatattcctagccaaatcagacgcatggattgaaccaccctagatacatccctcccaatatgtattgccgttcattgcattctcgggaagcgggtcacctatactttcatatatggaaagcatacagttattcctaggcagcataagttcattgtcgcaagggctgtgaacaagcgtcaacacagaacatcctattttgatacggggatcaaaagccaatgcagtcagcttcgccagaatccaacgtttttagatcctgctgagtcatgtttaactggttctattagctctcaaatgctatgtgaagaatagaagatcatcgacctccagttgtatatttgtgtggatgtatcaatttgggttgtctcatgctgttatggaatcatctcatgactcaacctcggttcccagctgagatgaaaccactcaagagggtatgctgttatgggtaaataatatttcaaagttgacatgggatgcaaattcaatctagtggttgctctccactgaagtggagaaggttagcgttcaaatggcaatgtctcaatagtcaggatttcttacctacgtagcttgtcctgtacttttagcaagcacctgctcctactactttcggttctaccgattaatagagaacaatagtacatagaggttgtccagatatgtgggtggtagtttgacccacattcatgcataactcgttcattgaagttcagcctcacactttcacttctttaccgtctgtctaagtcggatagaagtctagacaaatacatctgagtggcaaaatactctatcagtgacgcaacaaagctccaaattagacaaatcagactccctttcacatgccaatctcggggatcggcgatatatatctcggaagaacctaggaaatcgtcagccattccagttaggaagtgctcggttgatatgcactttccaaattaggaaagaacccgatccacagccacaccgatcccgccactccttgctgttccagccacagatcagccacgctcgagccacttacggctgatatggtggcggtgcgagctattggctttgtttctccctattttgcttttgttgggcttcagtttctgcatcttcgtatattttaccttttccagttcggatatgtttttttcgggccaacatgatgatgagtctattttgctcagtgtctcacttccccaacacttggggtcggactttattctgcatgcgcctgcgtcacaatcttctgcctgaggattggacctctaaaagcaagaatagctcattttccagtatagtatttgtcccgctgctcctgcggggcgtcgactgatctaaattattggtgagatcgtcgggacgatcgcccagctcttgaaggatatcatagggtcacggagaaatggcttaagcttttatggggtttccttagatctcaaaccagttccctggcatacacatggcatctctatcaaaagccgagtcttggctgggtcagtgaggctgatttatgcattttgtcaagtgttctatgctagtttgccagttcgcccggctgtaattccagacctctgttgtacatcggttaggcaacaacgttattagaaggtgaaaattctcacaggtcttaaaaatggtagaattcgatagcacaaaatagccttaggggttcgagttcgaggttggatatgtcggtgtttccgagtggcgaacaccatgtccacttgactccaccgccacaagttcaccgttagggtgtggcttgaattgctgattaaaggggctagacaaagcctgcaattgcggtctgatgttctcctttcatccgactaggtaggtacctccataacctacctactatgtttatgtgtacgaccacgatgaccacgagaccacgttgcccacgatgagatacttgcatactagtgatgcgccacatctaacaaaggtccagccatgacaccttacgattcaccagatgctaggaaccgagataccagacaccgacgctacgataaggacgaaaggacgaagggacgttgtaacttgtgcatcaaccctctccttgatccgtgcacggaactattgagaaggcctcaaggtaccagcccattatctcgaggtcccgtatctcaattcacaactcgtatccttgcacatgaacgtcagccgtgcatgccaagccgtttccctgtcagattgtaaggtttccgcatgcgcgaaaggactaaaccagaagctctaaattgcacagatcatggtggaacccctattgtgaggaaacccggggtcgatcctgacactagcttcagatctcctgcggtacatcttcgatctcacagatctctgacctgctccacacctgatatctcactagtacgcgtacccatcgatcagcccaaacttgaactaagttctatggagtccacactcgccccactcgattccgttccggaacgtgctgttgcaaggatcttgcagtatgccgagcagaccttttattgagctcacaaatgttttccttggctatcccaggtacctggtcatcgaccatgccgaggctaatcgtgtacttttgaatggtggcggcatttccgtggccccatcgtgaattaccacaagattgaggttatgggtccgaagtatgtgcgttactgatcttcggcgagtgccatgaggtatatgaagccctgagtacggctatttatacttcatctgattctcatattcatccatatcatcaatcattcttcctattattcttggctctcttttatccaattcttcttgaattatacttcacggttagttacagttccacgacatctccccttacttctcaatcggattgaagcggatcttcgagctttaatctttttttttttcatcaacgattcatccaacgcaattcgtctgttccaaagcactataccgtctacaaaaacgaaaatggccggccatgaattcacgctgtccttcgagactactcccccaacagccaccaagcccggttctcccttcacaatcccagtagtcattgccgtcaacccaatcgggacacccgcacaaaatgtgcagcaccttgtcgtgagcgcctccctccgtgacgaggctggcaccggacctgccgccggactgagtgggagtctcacggcaagtgtgcggagtcgaaccgataacgcaatgagcggatatgcaaaactcagcccgctcactatctcgcagccaggcaagttccggctgcgggtaatgcttagcgcggcttcgtacaacggtgttgtaacgaaggagtatgttgattcgacaataatccatgtgcacgccggtgcggctgctgcccaacggccaagtgggtcaatcctctttcttgcttttggtcgtttttgctttgttgcgggtccctcttcccttcttttcccttcttttctgactgcccctctcccgccatggcgtttttctcttcagggccaatgttcagcccctcctgctcgcctgtttcggactcttgctgacactcaaaactctagctcccactcaggtggcacgactccaacggctcacggctgaaaacttggatatctccacggcggacattgcagcatggcagcatgcatgactgaaggacatatagcattcttcctttttttttttttttttgctggggaatctcgggcgttattcatggtagcctgtggctgtacctgaacctggaaagatattttcttttaccacgtggaagaaatgcaaatccatcaactagtctcgggtgctctatatccactttttctctgatattttctttatgcatactcgctatacgttctctctattggatgattttaccaccgactatctttggtcacggaagaattttcctgactttccctctatctgttagcgcatacgctaacccaagccggaccaaatgttaatctctcttgatctaggcaaagtttgtagtttagttgcattaatccggggctttggcaaacctcgagcttgcatcccaacttcgcatcacctcatctttgggtcatgagaatcacttagaacggtgttctcgcttcgagtgaatccattactctggttatcatggttccccttgaaagacttggatgagaaaatcacccgctatatcacaacgtgtcaaactcaaaatggggcttgagatatctccaatctagacatgagcatccgctgtgtggaatcaaatagacagaatggatcccggtggcgcaagtgtttagttgaattcttacggggattaaatgagcggggcaaatacctaaatccataataccgagtctcgtgtacgaagcagccactgggttgcctgggcgaagatatatattcccatcatctctaaattacaaaaaaagaacaaaagaaactacaaggaaaaggcaacgagttagaaatctagtccacacatccggatattccattcctactctatctatacccactaggtagatcggctccatggcctatttaagtaatactcatccatgtaactactacatagtagtggggattgatccttttcgcgtgattatttagccccggcctagtgatgcaacatggtacagtcacgaaaccggtgtgcaagtggggtgtatggtggatatttgactcttgtctggtttcgaatagacggatgtctcattcaaggagacccgatgttctttaacgggtttacaggtatgttgcagttgctcttagaccaaaatatctaatatgttaaagcacttacaacgtctgtcccttgtggggccgttgctgtcatgggacactctgccgtcctcttgccacatcaggttaggatgacatcctcttagggcttacacaaaattgttcgcaactgcggtagacggctggttattcatattaccaatgaacccacagataacatgtatgaaggtgagacggagagaccgacaaatcccgcacagctcaatatggggacatcgtgatactattctcactagaatctacggctgtacaatagcctatacggacgtgtgatccttcgcggagccccactgctgactacaatatattaccagagtgcttttattccctgggtacaaagtggaatgtacggtgggattccggcgaataatgcggttgcgtcaagacatatcacaccgcatgtagtgggctatcatataaaaggtataatttaggtaaaccggcaacaaagcgatggtcatcaatcccgaatacgaattcctaccttgatcggtcactattccctactgattcctagcgcaagtctttagatcccatacccctgcaattaagcataccacaagaatccaactcgactggaataagctacaatggttggttctgggtgactcgtcgttgcattcgagaatgataatccggggtacgccgaagtctattatcttgtgaactacagtttcagatcctgatttatgaattgccacattgcctagtatccgagtcagagtttggcggtgcattctgtagagcacaagtcggagataccggagttagtggcctctgtttcggctgagtctgaattcgcttgtgcgaatattacaagagttctttgtataagcaggatgattcgagaatttcagacacgatattgttctaaggttagggcaaaaagttcttaatataggactttgtacatatgaggtggtatctgtatctcttcggtgaatatcggagcaagaggttcggtgggaaattgaacttcttctccactcctattgattctttcgcatctaccccagatttcatggatatagccactcaatcaacagttgaacagtatgggaattatctggtcgcagattttcccacccccgcctactctgaccgaagtcaatctccccagccaggatggcaaagtgttcattgtaacaggaggctactctggagttggcttccatatatgcagaattctttatcgcgtaggaggaacagtttatcttgccggtcggtctgaagaaaaggcattggaagcgattgcgaagatcaaaagcttgtgtaccccgacccccccagagggtaacataatttttctccctctatcactggatgacctgacatccatcaagcctgcagtgaagagatttgtcgccgctgaatctcgcctggatgttttattcaacaacgctggcatctccagccctcctcgggggacttcgcctcagggccacgatctgcaattcgcaactaattgtctcgggccacatctcttcactcaacttcttttaccgatactacggcacacggctggagctacacctgtcgctagtgtaagggttatctggacagcatcgattgtcgttgatgcattcgcgctcgagactgggatagaccttgcagaactattgcagaaagacgcggagaaatcacgaaattacctcaacacgaagatcggaaactggtttttggcagatgccctcgcaaaccagattggtgcagatgggatattaagtctggtgcagaacccagggaatatcaagacaaacatcatgcgccatagtcaggcttttgttccttttgttcttggaccgtttctttatgccccgaggttcggggcatatactgcaatttggtcggctttttctagggatctaaaaattgatgatgggggaaagtatatcttgccctgggggcggatacatccgtgtccaagatatgatttattgcgagctatgaaaggagaagaagaagggggaaccggcgttgcagcagcgtttgtaaagtattgtgactgtcagattgaagcgtttctttagttgctttatacttctttgaacttggagatgtttggggggtggtgagagaggagcatccattgcatggcgccaaggacataccccaaatggtagggtgcatgacaactgcttatcttgacgtacttttgctccaagtttctaaccctcttagtagtctccgatctttggagtcatcagctttattccagaatcatcgtattgaggagataccacccttgacgtgttggagcggacatgaagccaattgctcagccccagctaaaccatccttttatgtactagctttgctgacggactcaccaggtgactcactcagacattcttggcgagtttttcggttagcacggcattctagaagggcgctagaagggggtttatgctgatatgattggcgaagaaacgaagttgggggcacggagtcataaaggcttcgtatttcgcattcttgtttaatattaatcttaaccccgcggaaggacccacccgggcggaacgacgaactcactgctccgagaggaatcggacatggaagactcacgacttttggttttgagtggtgtatggtgatgtacacaccgaccagaaaggacagactgtagacgtgtccgtccgaatgtgggatgtggatagtggaaaaacaagccccgaggtgccaaaagattgtcaagcggtgaatctgcggggtccagggagcgggaagaggaggctccaaggcaggaacgactgttgattggctggtgggcgggcaatagggcactttggcccccggaaccttccaaactcaccgacaacaaacaaccaccctaaaccttactagtggagctgacaacgtgctactttcgactgtgattggtggagatgttgaggagtccgtcgccaagccctgtggcatgaagttgattggttgcgtctctactagagcggattcctctgtccgtatttgacatcatagcgactagaaccttggaaggttgtactttttgctgcattttggttggttgccctacggagtccccgatatcccaaccgggaatttacttgggtgtctgaaagaacataaataaaccccttccgcaggcttcttgacttctatttctcatcctctacttcatatcccaagtgatgcacactcaatccaacatctatcctaagagatcgctctcccaaacatcaactacctcaacctcctctcatactacccagttctctgagaagagtcattccaaactgtccaatcctctctcaattctcttccgatccaagtctcctgcaccgattgatatccccaagggccaaggcacaatgtcaatgtcacagcctcgagatatcccgcagcgcaatcgcaaaccttcatacttcccggatcaaggctacacctcagtcagcccccagatgtctgctagcatgggttcgccgaaggcgggctaccctaagcgcgcatctactcacacccggaagaacagcgatgactacaaacgttacagtggaactgtcaaccactacggtcgtcactcgaatgactggctattcggtggcttcagtgttcgcgagacgttccgtgatagcctcgataggcttcgcggccaggacaaggagagctgaatgaatgctcctgctcagcaatctcaaatacgtcccaatatatggaacctcctgtcggaactactctgtttggatcaccctcgggttcacatccgatcacatgatgacgcctactccgaccgttcagcgagaatcaatacctgatccgccatgatttgaaagctgttttgcttcaaggtcctggaaccgagcgtggtccgccctataggggtgtgactatactcggtcgttaaccaccgcgtccgctatttacgcattagcgaatcctctgtgatcatgcttcgtttttgccacgagcccctgctctcgatacgtgtggccgtgcggtacttaaattataccagttactcttggtgttctcccgggtcttgaaactttgatcattcccatcgtgttttgaattgtgttatcgaccgttttgcgatcgattctgttgtgaaatgaacagactcagccgcgtttttttttattgaaactttatcgaatgaaatttatatatcatgaagcgtggaattttacagaacagaagtaacgtagataagcacagcatcaattctagttagcgagatgatatgaggatatataaagtgtaaatgaagtcttagttgcaaggttacttcgtgtcaatcttagtaagaatcttcaagtatgcttaaagaagataatttactttggtgatatggcttttttatttttgtagttaatttgagagtttagcgaccaagatgtcgtacgtgtgtaccttttgcatatgttgtggattgaagatgttcggtaaaagtctggcttataataacaaagatggctaacctccctatcaaccagccaagtggccgagcagtaactcggccatcgcattcttccttggtctagtggtgatgatttccgcttgtcattaaaaccgataagcgcgggagaccggggttcgattccccgagggagagatttctttttttttttttcggtttagacttgtttcattaagcttacattgaacaatggatgggagcttctattacgcatagaactgacgcatttaggctgacttatgatggccatattttcagcaagaaaaacaaaaagccccaacgtttcttcaggcagaagtgcgcgatgcgagataaagtgagacactaacggcgaggctcgggcaatgtgatttgtgttttgccactggagcctagactaggccaagggtccaatgtttatttaaagcataacaatgtctgccgtttacttctaacacaacacttgccggcaaaaatcatggacttcttgtcttctctccgtagctcaatgcctaggctgttcgagggcagcgacgggccccccgagccggaagatcctctttctccgctccacgcggcagttgatgcagaagatgtggaccaggtgcgccaattggcggtcactgcggaccctgccgatctgactgtcgctctatctcgatgctgccaatctggtaaaatagccagcgcccaggctctgcttgaaaccgggcgatgtgatatcaacgcggcggtggagggagacacacttttattcttggcctcgaagaaagccgacttggccatagtcaagctcctacttcagtatggggccgatgccacaatcagatccaaaaacgggcggttcggagacaagcccccggctttcacacctctccatggcgtggcagatagtctgcatccctacgaaaagttggaagacctgccccgctacgaagaactgatgcagatactgctggatgctggatgcgaaatcaatgcacaggatgcccacggaaataccgcactactgctctctgtccaccgtgaggtagccctgattctatttctcttgcaacatggtgcggacccaaatatcgcagaagaccggggaggcacatctgcgcatttcttccaccaccccctggaccacccagagtggttcaaggccctgatggcgaatggagcccgcctggatattgtgcgaagtggagatggctacacaccgctgcatgcctatgcatctaaatgtcagctgggcgatctgtccttgttcacgccctttgtattggattggtcgatcactgacgacaatggcaacacgcttcttcatatcgccgccgcgaaacatcggcacgggagcaagaccatagcggaactgctgaatgttggcattgatccgaaccagaggaaccataaagggcaactgcctattcacatggttgaggggtctgaacaagatatccaggatgtattggacattctctgcgcaggcggtggagatctcgaggctaaagactatcgcggatgtactctgctcaccaaggccatgcgcggcaccccgcagtggaattgtcgcgagcttcttccgtatttcatcagccgcggagccaatatcaacgcgcaggatcacaaagggaacggggtactatcttatctgattgaaccatatcaattccgagatgagtacttggactttctactgtcccttggagcagatccaaaaatggtaaattacgaaggagactcgttcctgcaccatctcgcagccaattttgcgaccatcagcgaagacacggctcttttagccatgatcaaactcatgaaaatgggcgtctccccgacccttcccaatttccgaggtcggacgcctctgcatatgctatgcagtcaatcttcagactatttattcgcggcaaccgcagaaggaggcaaatatgctatcgacttactcctagatgcgggtctcggtgccgcactaaacttgagtgatcaccagggaattcgacctatccaccttgctaccacggtttcggagcaactggtcggtaaactgctcgcgcgcggggctgatgccacagtttcaacgaaggatggccgcaatttgttgcatattgcgtcaaccgcgcgtcaaagtaactgcgttgggctggtcttggaccactgcaattccaaggagttggattcaatgctcaatacacgatcggaagatgggagaacgccgttgcatgtggcctgtcgctctggaagactggagacagtgaatcttctcctcgcatacggagcagatgtcaacatcgaggacaagcacaaccgtacccctctggatgcatgcgccgagtccattgccgaagaccagctctggcagggggctgacgaccaacagaacatgatgaatacgcgctccgcggcaggtattttggtagatgacaatcaccggccgacgcagcccacatctaatatgaaaaaaacatataaccccaaacgtctgggatggaaaggagaaatcacatctgaaagttcgacgatcggaatcggacaaatcgtacgagcaatggcgtcccacggagctttggcgcatgaaaaatcttttggcgttagtcccatgcattatgcggtagccgagggaaatgaagaaatggtcgtggaattggaccgggtgtcacgagaaatgagcattgaggtgaaggattttagccctctccagacagaattctatctgctgcgctcccagcacctcccagaccttctcgggaaacaattcagggagtatgtttctgaaaccaatgtgctaccaatgatcttgctcggccagcaacaggaggttgcacaggcggtggagaagagtgcttctgttatcgaggataaatctgccatgccagcgctcatgtcctccctcgcgagatggggattttcggagctctttggccggattgggagtacgatgtctggcaattgggtcaacggcggctataccaatttccggggccaaaagtcgaccccatatctcctggcagctggtcagagagaccttcccaacctagatgttattcaggtgatggttgagaagttcaacgcggatgttaacatcagatttgaagcgggtatggttgataaacccactgtacactaccaatcaacgatggcactggatcgacattacaagccgggtgacacgatccttcatcaactggcccaaggcatacattggtggcatgaaggagccatccagtacctcctgaaacatggagcggaccccaatgcccaaaatgatcaaggcaagacgcctctatgcaatgcagttgcacggggagagctgggtggccaccgccagctcaaaatcaccagaatcttgctggagggcggtgccgatcctaacatcactgcggcgtgtggctatacccctctggctatgtcggcgcatgacaccgagttgttccaattactgatcgaacatggagcatacccttcccaggaacaccccatggaactattcgttgcattgtatagtttcaacgaagacgctgtctccgctcttttggacatggacctagactgcaacacgactgtattatccgacgcgcagccacattggcacacccaccgtttccaaaaagttccggcaacgcacgggctcatcttgagtcctcttctctacatctcaatggtaccatttaacgaggccaactcccgcgaccaagcctgcaggatgattaaactactggttgaacgcggggccgatcccttcctgccttgccacgagaaccaaacgattctacacgagatcttcgccagcggaggaattatccaaccatggctcgacatgcccaacctcgacctcgcacgacgcgaccatgcaggaagaactctgctcctggcagcggccagctgtctgactggaaccgactcgtacgcctgcacggtctcggcgtatccattccgaggtggacgccttggcccggcgccctggaaggagggcgaccccacgcgtgcaatggccttgtatgaacgaggagcggatttgagtgcaatagattacgagggaaacaatgtactgcattatctggctgaccttgactgctccaatgatcactttgcgtcgattgaagttcgacggacattggcgttgtttgtggaaaaagccccgcagttggtgcatcggaccaacatgcatgggcagacaccctggtcgatcgccgaggagaagaatttcgtggggtttatggagattttgcagacggataatgtgcacgcggaatgatagtcgcgggtgtcattatctgaaatatgtggctactggggaaggtggtcgggttgtccaatgcaatgtgacagtaacggcccacggcgtacggagtacatcatgcatgttctgtacataatataatttcaaggttcacttctacaatatatacacttagagtgcactgacaagcgaactgcaatgttgtaagaagaatatctgccatttgcagggataccgccttccatattcagaatcaggggtcaatctaaaaatattcaaatgacgtcagcccccactcttgctagccggacctccgcccagggtggtaagcaataccaagcttccctaggtctctcctgcattttcctcgatagctgttaaagatgagccatggatcacaaatgccagggcagttggaggatgagagcaatgacctcactcagaccccgccggagagtggccctctccaaacactgagtccgagaccgccacccaacactcaatggaaggcatcgtcgcggcaagtagaggagactcttgctaagggcctgtccaatgaggacctttggatgttgatccgccgattcgacaaggttggtgtaatctctggttgtcgagaataattgctgacatgtgaccagcaaatctaccatgtgaaagcggttcgtgatactgctgctttgaacttggatctcaatcgcactgaaaatgagaagtttccgccggaaaagctgcgcatgacgcttgagaggttttatatttccgtggttgtcggagtgaccgagttcatccgccatatcactcgcttgcgatcatggaaggaaccagcgagaacgacaatgttctgcacggtatgtggattacgaacagccagattctgtacaagatattaataatttgcagggctacttcgttgcttgggccctggatctcttagttccaaccattatgggtcttgtcgtagctttaataatggttccgcctgttcggctattattattccctgggctggcaagagccgatggcccaaatggaaaaaattcaaaaggaggacaagtacaatccgaagatagcctcacgggtgcccctgaaacccacaagggtgaaaccgctgaacaagaagccaaaaatatggttgacagctttgccactgttgctatggagagtgcggcggccaaatatggtcaaacggttacagacgactcatccgacgggcctgcgctcattgaaagcttagaagctgtagaggctgcagccgaaaccccggccggcgattctcctgaagacaaaaccaagaaacccatgaaaaagaaggtatcacatgcgactgataatgtcatgcgtatgctgagcgatattactgatacgtatgagaaattcgccaagtgagtcaattctggaaggatatatgaacacatactaatggtacaacagcatcctttctccaacacctccgttccttttggttacatctagactccgacttgcgggcatctttaccctggtgtctgttattgtatcattcacatctagttattggatcatcaagataatcggcttcgcacttggactgggtttctttggagacccaatattcacctacacccttgatatgctggacagaaaagtaccaaactggagagaccagctcgatttaaataagtatgatagctctcatttctttctttattacgttgctgactcggctacaggacacttttggctggcgttcccacaaatgcacagctcactttgaccctgcttcgaattggcgaaattaattcttcgccattaccacccgccccgtcatctgatgataacgagccggtatggcccctgcgccgtaaaaagtcacaggcagcgagctctaccgacgtcagtaggcaaggatcatctgtggaccttccgtcgacggtctccaccacatcgctttcagaaaccaaggtgccaaagaagaaattcgtgttcaggctcttcaagttcttccgccgcacaattgccacggcaatcaaggggcatatcgcctttgaccgggctattgccatcgcagggtcagcacataccaagaatctgcttagcatgctgcaaaatgggcactttgcctcaacgcctctggggcccttgaagttcgatgcgaagttcgaacgtaagagaggcgcagcagtcattgactcgtcgaaggagcctcctatcttgtattttaccacatatcaatccgccgggctggatgatttacgcatagaaagtaggaagaagggatctgttctgttccagattcctgtcaccgaaatcaaagagctgaagaagacggagggactagggtggaaggggaaattgatcgttgaattgacggctgggagcaaggaggctgcagatgggttggttgttagcggtgatgagctgggccagtcttatcatcttactggtatgagatcacggaaccaactgttcaatcggttggttgctatggatgctcagttctgggaaagtcgttgatacttctcgtgcataagtgtctagctccgctgtacatactgcaggtctatttagagtttaatgacatattttatgtacttaactacgattctgacttgaaacctcaggtagaactgtggtcgtacggcatggaacgctgtcgtcaaatattttccgcctgaatggccttttttttatcacatcccgagagcttccattttttgagaattattattagagtcctataagaaaaaaagtggtccttcaaggagtaattttgaaatggtgtattcaatctgattagatgagagatttccataggattcataggaacttcggcaactgctgcccttgtaacacagccagaaactcgtctcggtctttgaaccatctcgatatagattagcacagtaggaagagttacgaaaggagaagctacacttaccttcacttgtttgaaaggaaattgacatggcaccctctttgtttttgacaatgggattcttagaactccgagccataacattcatcatgtcaagtgtcgtaccacgcatgtatggaagacgcggaagggtgagtcgggtattctcttttgagcaatcaatgaactccgacggaacagccatagtaagccacttatccggcacggactcatcccaccgtgcggcaagttgaaaagctgttcctcggcgccatagttggatatcggcgctgcgcttggtggacatttggaacccaaagagcgagttacctttcgttgatagggactggatccgccgggaatagaggagttcgtatagaggagagagggagctgaggaatgagcgggctacagggtcgtttccaaactcgatggttgtttcactggtcttcttgtcagagtgggagaatgtgacggggccttctggatggtagagctggtcaacgtgagttgagatgtagtctgtgcagtagatgcgggggaaatggatgctgaacgaggagtggtcgtatatatagtcggcgtcacggtaaatatagtacaaatctgaatatcgccatggtgcacgagttcggaatactagcacggctttgtattgcttgtgctcagtgccagtatcaaccacattgtagataagtccggagctgctgggttgtgaccaggaaaaattcggatggaaattcatctctaggacggctttttcaaaatcttccgcttcttgatgtgagtggaattgtagaccgacaccgatatttggtgctgtctcgtcgtacacataagagtgcaaggggttgtaattgccatcagtcttgtcagatcgcacctggcatgtgtcggaccactgcaagaccacttgacgggacatatttcctcggctgatctgaactgcactgagaggcataaaaagttccatcgttcgtggggccttctcagcagcagaggaagtgatcactatgcgtcggatagaccgccaggcttctctaaaagatcgttccagaatgcgcacctcgcaggatttcaccataacaggcggattcattggtttcatggttggcgtgttcagctgctcgaagatatccaccgaggtcttgaaaataacgctctcggtaaattcggttgaatcaaatggttctctttgccatacggcgtcaaaataagcctttgggatattgatgaactgtgctaggtctctatcaaactggaaggatatcgaaacgctgatattatcaaatttgaatggcacaggttctgagactctagcgccagggaagccagtcaaatatgcatttgataattgtacaaggggcgacagatcatctagtacgactaataacggttagttttataagagggtattatgagaatcgtcacttacagtctcgttcaaggcacagagtgccactttggttgcaaaggacaatctttggctcgctttcaccttcccgtgttgccagcaagagcatgtagggagcacccttggtgcgcatgcgaaaccttttgcccccgatgcaggcgttgacaaaggtgcggtagagaaccttttcctgttcgttacctgcatcctctaggtcgacagcgatccagcgcaaattatccaaaccaagatctagattaatgctgccattccaagtttcctccggctgcatgggctcccaaatgtcaaggttctgggtatgtagatgcgacggttcgggaatgtcgacggaagtatattgggaaagctcctcattaatgccctatattgaattagcgacagattgaagtaatcataccacggcaccgacttcagaaagctcaacaattgacttgcgatcctcgtcaaccaaaagagcaggagagggctcttcctccagaacgatatcgtacagaatatatgaagccttgagcagatcaagataagcttggtgactaggcgatctcgattccatggagggactcagactgccacgggcgcagacatagttatgtctgttgcaattcgccaaagtcgtgcgcgccttgataactgttagtaaatattgcacctatttgttctacacgagctcactttcaacaaccaccaagttgccacgcgcaaccaatctcttgtggctagccttataatctgcaacccgtcattgactgatgccttgaatgttttcaatgtttccgcagttggtctatgcaatttattctgcggctcaaaccgtattggccttgagatatgctcccggtgccgaacatcacgaagatgttgcatagcgggcgtcacagcctcgataatgtgaggagagccatattcatcatcagagtaggatcgagtttgctgtacgacttgctcctccgcctggtcggagttgttcgcccatatcccatcatcgagtgtcccgccgtcaatcgagccgccaaagagaagttgctcactgcgcattcgggtatgatttatgcggcccctagtaggtacaaatggcgacgtgttcaaggttaaccaggaagttggcgaggtatcatcgaggggcgactcatccgattcagttatcgacgatttggaggatgtagacgtatgtttgaccttgctgctactgcccactgagcttctgttattacccaactccaacattttggcgcgaacttcctcgattatatccatttcgcatttttcttcgttgttagctggtagctccacgatgccctggccagggctcatcggcgagacaacggagtctgtatcccgaacaggtgatgccgctgtactgagaacgatctgctcatcttctcccgtcgccagaacaattgttttctctatgcgagcaagcgagggtctagacaaattagaccatgggcctggatctgggacaatcaaagcagacttacttccctatagagctcatatattggctcagattgcaggtgtgtaccgtgatttcggatctgagatcctcaatctgagttcgttgtgtcacccacttgatcttttgccagaaaccctttccatctccagtttcgaagcccttaagccgggaaaggagctcttttagtcgctgtagggtcgcgaagcacgcaccgagggatcgttcaaacgtctgtttgcaattttcatccatcttctcaagaaatgatgccttgaaatccacattgtcaacaaaggtgcgtaaggtgccctgtaaggagcccagctcagtcgctagcttttgaaatcctgcgggggcatctttcgcaatgatctggcattggctgtataggtcccatgtcaccttggcgagggcagggatctcgataactccgagacttgaaggcatccttgacaaaaggaattcacctcgatgagactagatttttttgagagagaacggacacgaagctgtgagaggtgcggctttccgcagtcatgatccacaagactatgtaaacaaaatgtctttcaatggatacgagctgagccaggcagtaaaatataataaagcgtttcccggggacaggccgaacattgcttagccattctagtcacccatgaaagagacagcctcgaatgataacccgccaagcgttccgagctaatatgaagatcgactattcgatggctgctcccaataggtacttattccgagtcagagattggcacggcatatgctttggcaaaccgaatcaatggtatgaatgagtatcggtggggaacgcagacggcctttccaaaatgcatatttctttgacaatgcgccgctaggctctgtgtgtgctgcaaccaaacaaagaagtgcagtaaaagtggcgtcggataaccgaaagctggactgcaactatgcaaacgatctagcagccagaggattatttgattttctcccagattggtgtgttccgtcttgggtaggacatgaagttggacgcatggaagccgtccacttattccctgcagtttgctgtcaaggtagttcaaacgaaatcaaacattgcaatatgcaatcagctgcaaggatattgctttccaatgacaaaggaaatataaatataactcctccgtactctgcgagctctcagagatcgacatctgcgacccactttctgcctgaggcgccaacttttgatcgtcgcgacagctcagcccctaattttttattttcgttcctatcagacacctcatccagctctcaattgattccacaaagcatgaagtacatcggaaagtgttgatttcactaggccgagacatctacaagcttgcctaccattatagagcctcacacgatatccaattaatcaatccaccatggcgtccaccgcgtccttcaccttagacgccacgacagtcctctgtatcgtattctcactttctatgatgccaattgcgtacattttgagcaagacacttgtcccagcccacaggacacgcgatcgtgtcctcttcttctggcacgcctatgatgctctcacccacatcttcatcgaaggctccttcctctacgaatgcttcttcagctataccactgtcactgggaatcaaaacgtggagcccttcttcctcaatgaccccactcgtgtctacggtcccgcctatgggagtggacctgcgtcacgtttgtggcaggaatacgccaaggctgaccgccgctgggctggcgctgatttgactgtcgtctcgctggagttattgaccgtcttcctcggtggtccggctgcgatatacatctgctatctgctgtgccggtcgtcaaatgagaagatcagtgccagatcccggggcggtgttaaggcaacgctgtggctggtttcaacagtgctggctacggcggagttgtatggtggattcatgacctttgcaccggagtggctgacgggaagctcgcagctggctaccgaggatccggtttacctttggctgtacttgttctttttcaacaccctctgggtctttatccctctgtgggtgctgtgggaggcagcgaaggagctacgcggtgcctttgtggcggcggagtcccagaatgagaggaaatctcagtgagctcggtccgagggtgggtgttgtcggaagtctgcatgaacttacgcctgaagcctgttctcttctttttctttttcggaaatcttgatacacatcaggtacaaaatgaggccgaattgtcgccacctttaggattgtgatgaaatagaataagatagattcctattatctcccaagcattaccggctgtctattgataatagtaaagaatattcacgttggcttgttgcatggtacttaggtacctagaatccctgaggtgccattgttgtggaatggaacaaccaccattcaactcaaggttcggcgggcttatggtgcaagtgagcggctttgagatttatcacttcagtctacactctaaccatttgattttagacattcattcccgtgtgggtagagcaaatatgctccaaactacgcattgtccgaatgggcttcgacgctgaacaagcattgtatcgcggcttctctcctaatgcatatcactcaaggtgcatctgcatatatcaaaagcctctgggcctagactgccgatcaaaattttgatattgttccacaagatcagttagtactgtactctgctcgtggtattctcgtcgagagctttggtcccacatcgctctatggtactgcttcactgactgttgaggaccgcagcaaggaccctgatgactttgcacctctgactaggtctatactacgacctagggagcattgcactttcctatttctagctgtgaaccatcactatcagctgatttttgcaatatgggattgcaggtcgggcatacttcactggcccaatcaagggccgtggcttggtccgctcgaattcaaccactcgcatatagtctgtggtagctacaagcactgccttggtccttggaagctagaaggattgtatgcactcggtctatgtacggtggtgatgttggcaagtggttttctccaatgcttctaatgagacatcaagttccgttgtgattgatatagccatcagatcaggttatcgtaaataggaatggaaatattctatttggatttaaaacgaatgacccaacttgataatccatgccatatctgaaataatcatacttgttcctatacgaaagccccattgtcggatgttcaatgtgagtgcaatcaagtttgtacgtcgacgatgtaaacaatcgcaatggcgagtgactgtgttagggtcaggttgcgcaggtgactgacttgacggccattcatctacaccttccatcctccttttcctttactcctgtttatcactccaccatcactttcttttcatcactcctttccatccttttttcccctttctgtcttcaatcacaagtcagatttcaccaagatggcactcttcataccgatgagtcttgtccctctctgttttccaacccctcctaccccaaagacggaattccaaaccctaccagcagaaatcaagcttctcatcattgaccagcttgatcgtgacacctacacactgagccatctagctgcctgcaacagggagctttataacatggcgatccctgcactgtacgccaatgtgtctttgggagctgtccctcattaccggatgtggcccggtttggcatttcccgctgatcgtcgttctgtaacttcctctcttccgggaatcaatgttcgctctctcatgacaaataaacagatcgaacgctttcttataacaatcctccgcaagcctcaccttgcagaattcgtgaaatccctcgacgtgaccgacctacacgacctttgcttcgagcacaggcagagtagtactcagagaagacagcttcttcttaatcctctcgctcctcaagaccatcaaatgattatggacgccgccatgaaattacctttgtattcaacaatcagggtggcgatgcgcaaagcccttggttgcgatgtaccccggtcagatgccatggtagctgttcttctggggtacctgcctgccctaaagcacctcgaaatcgcgatggagagtgaagatccgttccgcgaaccgcaaaccacagagttgaaccttattgaacgtgttctgatcagtatcgccggtgcgcgctcggctcagaccgacgaaaatggcatttcaaatgctcttacacctacgctgtctaagctcacccacctgaaggccgaagtcgacggaaaatcgcccatggctgacattgattggctcatgatgcttcttcgaattcccacgttgacccacgtattcggcaccaaatggtccaacgcacaacggtggctgcgacctgtacctggcagttcccatcgcctcgttcaccttgaacttcgcgactgcacttttgacgccctgaatcttcgaagactgctccgacaaacccacatcttggaaaccttcatctacgaacgcgggtggacagaggcaaaagattgggtcgtgaaggctgcggacctcagccaagcgcttcagtacaggtctcacaccctgacctgtcttgaactatcattcaatcgaaccgatagaaagatccacgaagaattgtatctccatcctctcaacctatcggggctttctcatctgaagagactccggatttcggccggctaccttgtccagactgaaacaaaatcggcacactatgaaggtcgtcactggcggttacatgacgtggatggagcatacaacagaaatcttcctttgcacaagctacttccagagtcacttgaggagctacacatcattcaaattctagatgttctcgaattcatgctcttgtgtgagaagctgtgcgcaagtctccagagcagaatagttcccatgtctctggagcctcaccacttcgaatgcctgaaagagatcaaaatcgaggctccctttgagggcgaaggtgagtgtatcttttcggaactctccagagtcacaaaccaggctggagtgaagttgacaacaatcgaaaactccgccgactatgtcaagtcctggattaccggcaaatcgaaaccatcatgtgccgacaagaagattgactgggggtttgacggcgacgtccgatgggcacgtccttttattcagcgaggagtgacacactagtagctcaggggaatgatcatgatgtattggctagccatgtgatgactatttgcgtgctacgcattaggatgatatgagatataccattcgactccgaattagacggttgtacttgcccttcctaatcctcgactatcgcacctgctatatccgtattttccataataggaaggattaataggaaggagtcgctccttcctaatccattaagtaaggactatataaaactaggtcgtaagaacgcatagatagttttccctttctctctctcctctatacttagaatcctagagtaaatatactcttttcctttagattaaactagcatgttacagtgattatagaactataagcaagtaagtaagcaagtaaatagttaaaccacagcgtagccgctgagccggctgcaggccatttaagtaagcaagtaagtaactaagcctccctggggggtggggggtaggttcaaacgcctaaaggcctatatatcgtatataacctgctaggatgttttgtcaaggaatacaacggtccccttcatgggaaccccttgcccatctccgcggactttggaaaaaggggtagcaaaacgccaaggagaccttaaaggcctcggtcgaatcaagccctcttctcgtgtgtgcgtccggctgaaaaggatcaggctctaataaaagaggcacgaaggattgccgggaaacccgcttttggatgcgatgtccgaacagtcgtctctcttcctcccctcctgaaagcagtcgttgccgcggccttgcctaactgattaaaggtccaaaggcaagtcgcgccgctatcaggattgggcttggacaaccttcatgatgtagacttccctcgtcaacctgctgctccctctcgggattgcatcaacggcatctgccacggtgctgctctacccagacagtctgccctcgacactcacttcggagtgcaccgctgccttgactgtcgacgtcacagtctgtgacccgctggtgagggacctccgcctggatatcttctacccgcccgcgtcactgacgcgcatctgcaccaccggctgctcatctgcccttgagacatggcgatcgtcggtccagtccgtgtgcgggaaccagacggtcacggtcgatcttgaggttgagaccgcggctgtctatattcccggcgcgctgcagtactactttcagcatgcctgcctcaaggacgacgggggccgtttctgcagaccagtcgcggccctggcagcggtgttttcggatcccggcatcagccctttcaactacatcagcaacgtcacaggccagttgctgcccgacgactgcgatacgtgcctggccgaacggctgcggctgcgcgagggatcgccgtatgacgacggtcccatcgcggtcaggatgtcgctgtacaagagcatgacggcgagttgcggcattgcgggacgccccgtcgtaccaacgaccatcggctacttcacggcagcccccgctccgacggccgaggtgtgtgaaggctcgacctacaccatccaggcatcggacgactgctacaccatatccaggagccagggcgtcggcaccaactggctgctggccgacaacaacctggaagtcttttgcaccaacttccctgccgcgggcacctctatctgcattaccaaccagtgcaccactgtcaccgtgcccgtgaatgcgacgtgtgaggccgtggccgcggcggccaacatcaccgaggcgcagctcattgcctgaaaccaggccgtgagtggcgattgcgtgacaaattattggttgggcgaggcgtattatgttggccttagtgcttagataggtagataggagggggtgggataagaattgatcgaagaagttgtcttttgtgcttgttggtgaacagctgtgagcgattgtcgggccttcattgcttgaaattgacatttgaatctgctctattcaaagttaccggccagccgtgttgattcagtacattacctagaaaatttgattctcgtcacagaaagtcctgagggtcttgctccctctcttccacaaactcaagtgctttccacaccatgttgccctccccgtcttgtccgcccacgagatcctcaaacgccctaatgacttcgtcgtccggcctccagtcctcaccgacatgccacgtcacctttcctttcccatctcctccagcagcgggcgcctcatatctcaccccccatcggaacattatcgaaatcccctccacacccgaggaaggaggcacctcatcactcccttcatactcttcggcccgcacattagagggccgccacgtaagccaggtgaatagctcggcgtcttgaagggagggcatattttgccgttgcagagataaggcaaacgctaagagtaaagggttaacgcgctccgcaatagggtgtatacgaaacatgtcgggctggcggagatcgtatatgtccggtgcgtcgtcccagtactcgtccttctcctccgacatcagctcgtgcgtctcgtcgtcgttttcctggcccggcgggtagtgctcctctcttgtgatagcgaaacctattgggtagggatcttcccctcgtgggccggaaaagtaccagctgccgtcgggcgcatacggatggaattctatccggaggtaccgcatgcgtatccataacaaagcgtcgctcccagaggggaaaagatcgggggtaataagcgcgcaggtatccagttcctccaggcaacttcctagctcccgcagcccaagagacacagggtctacattattaaactcgttatttatagacgacgacgtaccaataaggtcaggtaactgctccgcttgatccatctcgtcccagcaatacgggtttggcctccagaaccaaagacggaccttggtaagggaggacggcaataagggcatggcttggcgcacaccccgtgcgaactcggcgcggtcgtcgcgccaaggacctgcccagacgcgggaaatgatacgtagtgccttagatgtgaagggaatggggaagtgctccccaagccaggggcagagcagccggcggagctgaggaaggcgggtagcgagatcgaggggggtgcgcatagagacgggtcgcataccaaacggtttcccggtaaacgcctcttcgggtacgatgagcaggtcggtgacgcagttgaggacaggcaggctatccacgttctggacggtgaggcggcgactatggaaggcacggtgcaagcagttgcggtcaccaccccatgcgtcgggatcagactcgattacctggttgccaatgtagatgccgggctgaagacctcgatcagcgtcgatcaaggctggctcgtctggggactgcttggctgccatgtcttcgatttcgtgcagaccgttgaaaaaggcgtgcacttgggctgaaaagtgggcgttgacggcctcgaagtcggcccccggctccctgcacgggagcggcgcgccaggcacgttgaggaggagaggcatttccgcatggagttggcccccgccaaagacaagcgggacgctcccgggctcattgtgggcgcgcatgttttggaggaaggcctggacggtcgcatctttggagggcggcgtgagtacctgaatgtgttgggacgccattgtgaggattgtctcgcaatggtcgcgattggatgattccctagacttaggtgttgggtgatagaggcaacttggaagttgctcgagcagccgcggatgaccagtaaaccaggctccccgacagcaaattaattgagattcacaagacctgttttttttaccgtcccacctcccacaccacttttcctaggcacttgcaatgctcccaagcactctttacatcaacctaccacggtatagggtaggctgttgagggtaaggggcggggtgatcgctttctgccggtttgactgcctatttggatagtagcgatactaggtaccggtgtcgcctaagatatggcgtagtaccggctgccagtgctgctggttaaaactttgatgagaaaaacaaaactagggtccttcatcaaaaaaggagctactcctagatcggaacggacatgctaccagatgatatactggtagctcaggggaatgatcatgatgtattggctagctacggcagcggggtaactagctacagtaaggtcacgtgcacccttccgtgggtaacaaggagcgttgaattccacccgagccgctaagtgtttgaattggagtccggggggaagggggtgggggatgtattgatatggggatcaaacaatgaagtgtatgagaaggttccccttccctttccccttctcacttgaatgtaatgagtacgatgtacgatgtatgtaggaattgaattgactgccttgtggcctgatatgtgcacggaccatttatggccatgatcgacatgatgtaatccatccacatggcccccgggggtagtggacctcggctttaatccaagagatcacgtttgtaacttatgagaatcttgccactgtctgtaattatcatcatttcaattcatatccgaaatacctcactcctgcgcattctgtttgaaacggatattagaggttgaatggcctgatccggctcgtaacaaatcatcaattccccagaagtggatctcgaactcgagtactcgagcaccaacagagccatggccgaatacaaaatatcctacgagtcccaactggtgtgttctaagaacccaatcgcatctatttctcacacatccgcatgtgcatccctatcaggccatactaacatactcacaatcaaggacgtataccacccctcctaccgctacgaagcccatgacccgcgcgactggcaatcagccgctgcccgtggaccagccctcccagccctaggaaatgcaaccgccggtgcagtcggcgcagccatctcgaatgtggtcgtctacccactcaatgtcatcgtcgcccgtctacagacccagaagcagaaggacaccaactcgagcgaaaaatcagaagataataagaataccgacgaaggatataccagcgtggcggacgctgctcgcaaaatatacgcgcaggaaggcatctccgggttctaccccggtctggcgcaggatacttggaagaccgtcgcggattcgttccttttcttccttgcatatagtgcccttcgccagaagaggatagtcgcacgtgtaggtgtagaacgagctgccaagagcaagaatattgttcttccgataatcgacgaacttgccgttgggatattggctggctcgtttgccaagctgttcaccacaccactgtcaaatatcgtcgcgcgcaagcagacggctgcggcgcgcaagggcgggaatgcgaagaacctgtcaaccagtgacatcgcagctcgcatccgctctgagaagggtatcctaggcttttggtctggatactcggccaccctgatactgactttgaatccgtcgctcacgttcttccttaatgaattcctcaaacggaccttcctaccacgctcgaaacgcgacaaacctcatccggctttgacattccttttggcagccctaagtaaggtcgccgcctcgtcaatcacatatccattctccctcgcgaaaaccagagctcaagtaatgagctcgatctccaagcccaagtccgagtctgcggagaagactcgggcctctgttctcgcctctctcacccccgaaatacttttcacagtcgccaccatcgcccgcacagatggtatatcaggactctacgccggtctccagggtgaagtgctaaaaggcttcttctcgcacggcttcacaatgctcgtgaaagacgccgtgtacgcgtttataatcaagagctactacctcctgctgctgctgggacatcgctatccttcgcccgacgaacttatccagcgtgcccgcgaacaggcggaggagtattctgagatcgcgcgcgaaggagcgcgtgacttagcagagaggacaagggaaggtgccgaggagctgctgaaggctggttctggtggtaacgctgttgatatgacatcaaacttcgcggacgctgctgatgctgcaaggaatgcggatagtggcatcgatgcttcttcgggtctgaaggattcttcggcgatttctgacgaactcaatgagacggctgagctggtcggcgattatgttgaagacgaagcggccgagtggcggaccctttatcattggttttgggagaaggatcgtggaccgcaccgggattgatttggcaaaaatatagtttttgatgtctacatatttcgcattcttgttacgattagtttcttgttcagtgaggtaaacaatacgaaactcaactaaacgtccacttagcagatccccatctcagctggctgaattagttacaggacctctccaagtccaagcaactcatctacctcgccccagaacacaatgaagaagacattgcatttttccacgatctcattaacgaccctataatccaaaccctaagcaccggccgtctcccgcgcccatctcacaaaaagtccgcaagggacttcatcagcagactccaagaccgcattctaggagtagtcatatgtctccctgcacaaaagtcccgcgcagaagcaggaaccgaaaccgacccctcgcttctttcctcggcccaaacttcagatgcaccagtccaaaatccaaactccaagccagtcctaaccggccacttaagcctttccagcttgaccggactagactacgcgcaccatcgcaatgcagtgataggaatctcaactgcggacgggtaccgcgggaaaggatacggcggcgaggcgattaactgggctttgcattgggcttttcagcatggtggtctgcatagggtttctaaaggcgcgttttcgttcaatcataatgctttgaggctttatcggaggcctggatttgtggatgaaggtcgtgagcgggaggctatttattatcggagggcgtggcatgatactgttggtttgtcgatgctagagcatgggtgggaggttttgaggattggggatatggtgctggatcgagctgatcgcgcttgagcgatagtgaaggtttggcttttggtatgttgttgacggtctggttgcttcattttgatcaattcaatatggaagaatttgaagggacatttcttgagatctaacttggaaggattgttatgattggatgatagctgctcaattattcccatttagtagacagtagtttgaagaccattagaccatccatcatcccaaataatactatacaagaaggattgccgtgagaccaaaccccaactacggcggtaccgcaacacgaagatgcgcatcaaccaaatcaaaccaaatccccccaaacccagactccctcgaagccctagccagcttcacaaattcctgcagccgtgccacacacgagatctgaaccgtgaacgaagtcaagcgttccagcaaatcttctccaggcccatatatctcaaacatagccatcgtcaaaggaaacaccaccggcagcgcactagattcctttacattgaccgctgatttggcaaagaacgacaattcagagaatattccatttgcgagtttccacgcggccccatcctcgactcctagcggataccgcagccggtggaggatcaataaggctgctagacggtacacgttcgcttgtgttaccattgcgaggaccgcatgttggccgtagctttcgaatagtccggaaggagtttggggccgccagcgtctgatcgtctgctctagcccatccagtcggtcgtgaagggctgtgtgtgcttcagaaccgacaggaggagcttgtatcttcaaggtattgctgcattcgcagatgtcatagaggtgagggaggagtgtcgcgcaaaggccaagatagcggtcaacgatgacgcgacgctgggggtcgagtcgtattatagggatttcacggtgcactaggcactcgaccgtgtcgatcagaatcggggacatggttatcgtgtccatgatcggggcttgcactagtctggggagccatgctttggtcgacatgagggagctccggacgatagagtgcgctgtactggagtatggcgccgtgagtacgtcgaacacgtacatggtctggcccaggaagagagcgcaagctgcgctgtagtcatttgagatttccacgcttcttagacgctgcaagcccttcgctgccttgaacatatcgggctcgctccggcggataacaggcgacttttggtaattcgacatcagccctaggaaggccaggtatccttcggtcagcaccggggcggataattgcaaaatagcataaacagtcttttgggatcccgggataaaactagatccgaatataaatggcgaatgtatggctgagaattgttccacgtccgtaacagtgcgaagcgcatctgatgttgtttggaagttgacgggggcggcgagtaatttctcaggcgatattaccacgacctcggtactgtcaggggtccaaggttcgtcatctctgggagtcgagctcgaagatgaacatggactagaggaggagtatgagagatggctgtcgttgtccttggacttggcgcgctgtcgcgacacagcagtagaaacccgcaaatccccatgttggacgtctttgggagaagtgtggtgtatcatgcgcttggaatgacgagcagtggagccaatcttcagacgattacatctcatgcatgttggactagtacctgcagcacatgtctctttctctttacttgtattgcagtgggcgcaggccttcgacatgattttagcgcgaatcgagggaaatagcaagagaccagttgtaaaatggtttggagcagttcggtcagtttccagatgtcggcgttgtatgaattcagggaggtgtcacggtaagatccgtcggtttccccgctctccccaggatatccagggctgatcggcgtatggacttcctctttgggtattgcgatcagatctcgtttagggccatgaaagatatggagaatagtaggtcagtagtatctcaccgcttcacaatgtctatgggtgataatttcaccctctgccaaaagtactggttgggttgcgcactgaatccccagccaatggaagcgcagacgcgaacgcggactgaatcacgcgatcagcacatagcttgcaaatataccaaggcctcttgatctcgccggctataaccgagctggagaagaataagccatccattgacgaaataaaaatcacattgttagccgccggttcatccataacaaggtcccgagggtgtttgcggttcgcctacactacctatgccccgaaagggcaacccttcgcatggaccggctaccccagaaggtccccggtctctccataaactccactcacgacttcggcacggtagcatggggccgagaggacaccgactcggggacaatattgacttcagcgtcaacatgcatcagtaacatccagactttctgctcggaaccagatggctttttcaacacctacgaaacgatgcaactcaatctcatcgcggtcttcgaaagatctgggccgcagtcttcactgataatgctgcttccggtggctgaagtgcgcgtcatgacagcccatcaagattcaagcctatttgaagcctagccgtgagcattgatgtcatatttcccccacatttaccaaaacagaagttggtcgcaaaccttgtgggcggattcgccaactccgtacataggggtctggaacagactaggaagtgattcgaagatgtcactcggatatgttgcatcttggctaaacgttgactttgctttgtggatactttcaggtcgtgcatatagttgagttcatgggctgaattggcaagcacagactttggatggaagaacctgggctgtgctgaaaagggaaatcaaagttgcgttgcgggtgactatcctccgcccgcgaccgtacaatgacaccgtcattgattgagcacagtatacattacatgtaactcaagccacctatgcaaactacccaaaccactaattcctacacgatacaaactacgcagaaaccaaaaaagatgactgatagcaaaagttaaattgaacatcatcgggcgaacccaagagtctaccagcaactagttacgaaggacaccaacagtcccatagttacccacgaaaagaaaagactcccaacctcaggggacatagaagaaaagcagtcctaaccaaagcaattccccaaaccccaatccaattaccgcaaaaacaaacaagtagaacccatcacaccgtagcgcattaagtaaggaaagccttcgaccgacacgcactccacacgcagcgagtgtgagtgactgagcagcaagtagctaacaacgaatctaaccaccgaatccgtaaagagtacggccttggcgcttaagagcatagacaacgtcaagcgaagtaacagtcttacgcttagcgtgctcggtgtaggtgacagcatcacggatgacggactccaagaaggacttgagcacgccgcgggtctcctcgtagatcatggcggagatacgcttgacaccgccacggcgggcgagacggcggatggcgggcttggtgattccctggatgttgtcgcgcaagatcttgcggtggcgcttggcgccgcctttgccgaggccttttccgcctttgccgcctgtttttggttgttagttttgtttgggaaggtactaggtttgatatgtggatataagtgtggcgggacgaagggcagggagtatagttgaagggtggttggaggttgtcttaagatgcagggaaggtgggatgcagtttgtgcctgaggcagtaatcacgtgtcgacaggggcatcaccatcaccggttctaatccgggaacatcaccacgacaaggatataacgacaacgagagataaaaaaaagaataatacttacgtccagacatagtttcagataagaagaaataaaagtacttaaaaagtagatgaatcgacgtctgtgtcgtcgataaacgatggggaaaaaaacgcgcttgatgggatggcgttcagagtaaagaggggagaaaataagaaaatcgctaagtggaggggggaaggcagtttaaataagaaagccgattacgcgtgatccggaaagtacgtgttttaggtaagcgagaaattgcattctgcaatccggcggtgattggcgggcggcggggaaagaaaaagagtgttaggaagggtcggtttccagcgcgtctaccaggcatcggcgagcccgcgttttcctgcggcgagcgacattgatactagtcacgtggtgataggagatacgggtggggctgccgaatcaggtatagcctaatcgggaagtatatcgaaagacccacctccagcttttaacgtggctagcattcttatcaagtgctacatagtacatactactatagtaagaatgcttcatgtttccgctatcctacaagctacaagaaaaaggaagttccagtcagtgcgcgtgcatcatgtctcgtatcatttcaaaacaacgtcgcggtgcctatataataggcagtcatgtatcactatcttcgcatcctcatatcccaatcccattccacatccacccagaaacctaggtagaccgtatcgtggaattaaggagtaacaagcggaagaaaaaaaaacaaaacacaaaaaaacgcccgaacaccatgcaataaaaacaaccgatcaaatacaatgcagcgaaatcaaaagcggagacaggcatactaaaaacttttgcgttgaaaaaggaagggccatccagagacgaacagcaaagaatcgaaagatgcctcggaaaagaaatcgtagcgtcatcatgcatagccaagcggcacgcagtaaacaaaaacaaaaacatcgcgagaatgtccgcaccaaacaaagctggacgggcgcgtcgaaaattcgggccgacgactgatggtagcaaaccgacagagaatgataacgaaacgtccgcggtttattatgcatcgcaaagacaaacgctcacatttgctgttggttgaaaccaaaagagcgggtagttgagatgaagtaatcaaagagtcaaaagaaagaatccatcaaagtgcgccgttacgcggtagggtcaaggtagtcgaaatttggtcaacggatttgtccagttccacacatggacaaccaaattcccttcacagagtcgtcaacgatgtttcaaggccggccggaatagccaggttggactctgtcagaacagtctattttactcaccctctaatgactgttggagagtgaggttcattcatgaagttgtggtggaaagagtggcgaaaccccataggggaggttgagggccgcggggaggtgcgcgggctcacagaagcccggggggcctcgacgacaggagaatcgcgaggagcaagagagcgaggagacagaggcggcgagatacaggctggggaagagacatgcttcgcggcctcgcctgcacgagcgttcgagatcgatggttgtgccttcggggtcgatccttgcggagatccatactgtggggggttagttgactatcataagtgatgcgcagttgagaaacttacaaagcagtacttatcaaccagttcctggtacacggaagactcaagctgtggcttgctagataccaaggaggaaggtttctgatccacacgacctccggggcggaagctatcgttcactgcagagccattgcccagctcgaagctgggggttttcttggccggtttgggagtctccggcaccacggcctccccagatttcgcacgggcagtcagagcggtccgatccaggggcgcctttgaccgaatagcagccgataacgacgctccaaagtcgtatcggttgccaaatgcctggcggttcgggttttcacgacgcttggggggtgcgaccgtatcaatatcatccgacggcatgcgagccaagggcgcaccatcggcatcatcgaaaagggatgtgaaagacttcttgtcgttgaacttcttgtcgctaaggtcggggaaatcatagttgggcggcatagactggggtcgaatgttatggatgctggtgaaggatcgactgcgcggaagagcaggttttccgcctgcaggcttatggatcttgggcactttgtggaaatcaatctgatagtttaccgaaccattgttgtcccaatattcctgtccatccacgttgtagcggatgcacatgaacatggtcttggtctccaggttggcctgatcatccaacttcaggtcgaacgaaaagcgatcgaacccgtccgctgcttgctggcggcgaacatcgtggcagtatgccgctgcaacctccgaggtagttctccagtagtccagcgtgaaccgagcggtcacactcttgtggaaagcaagattggccactgcgacatttccgatcagagtgctcttatcagccgacaagaacaatcgctcaaggcgcaccgggcgagtggcagctgatgaggtatccttgggccaattggagagcttgatctcccattcccacgaccgaccgcgcgcatccgaagagtcaaaggggaactcgtgcttgttgtcgtggttttcgactggagacgtttcggtgctgacagccaatggccggtccagctggaggaagtgacggatatgctccaagtgagagtcgaaatgcacagccttcgaatagacgggagtaccgggcatgctagatggtcgtcgtctggccgaagaggggcggagagcaggtcgaaccagctcacctgacttcttacggaccatcaggggcttgcacgacatctcctcgtcactttcgtcgggcgagctagtcaatgccgattcccgagtcaactcccgagtcaactcgatggcggtttcagtggatgatcgagagtgagtgatcttgcgagcttctttggacaatggtaggtgagggagcttggggcgagtggtcggcgcactcgacgagagccgctccggtgtttcagacgaacccattctttccggtgaactctccctccttactttgattgatcgaacagcagcctgcagctcgtcgtacctgacaccgtcgccgcgtcggcgtggtgattcttcatcacttgagtttgggccggactcaggaggggnnnnnnnnnnnnnnnnnnnnnnnnnnnnnnnnnnnnnnnnnnnnnnnnnnnnnnnnnnnnnnnnnnnnnnnnnnnnnnnnnnnnnnnnnnnnnnnnnnnnnnnnnnnnnnnnnnnnnnnnnnnnnnnnnnnnnnnnnnnnnnnnnnnnnnnnnnnnnnnnnnnnnnnnnnnnnnnnnnnnnnnnnnnnnnnnnnnnnnnnnnnnnnnnnnnnnnnnnnnnnnnnnnnnnnnnnnnnnnnnnnnnnnnnnnnnnnnnagaggggggggggggggcccgagccgggggttctggagaggaatgcactgtcggtttggtgttcgaagggttcctccgaggacgagtagcagaatgtggacgagcccgtgtcggggagcgaaccaaacctggccgctctatgggctcggtgggggagtattcaatgtgctgcgcggagagcaacttctttaccggcgcaatgtatggcatccggccgacttgcgtgtctcaacacaagaaggggatgaaaggtagataggaaggactcgggggaggggtccaaatgttcaatcacagtacagtgtctgaagtagcttcgccgtcagtaaggcttcattaaattccgggtttgtggcgacgggaggtcagtggcaaggcaaggcaagaggcgaggaaagccagcacggcattttcatcgaggtatgagatgggatgcagcagggtgacacttgaggaaggtgcccggtgccagtgggggagtccaggttgcaccggtcacacacacagcgactcagggaattgggtagtcaattgcagaaggagagagattatcaataccgtgaagtatgaacatcgagtggcgatgtgatattagccaagggcaagaggagaaggaatttaaaatagtacagagaagagacaagatgtacatataaagaagaaagaaaaggcaagctcccggcacagccgtgatcaggaggtgatttaaaaggtatcttggaagtagataaccttggaagttgtgtatagtggcaaatcaagccattcccactatgactgtgtgagaagataagccgggatggggaaagaaaagatgacgaaagcgacaaaatccggtattatagctttttccgagaaaatgggaaaatcattaaaatcctaaatgaaaaagtggggcgattaaataaaaataattgtgccatccgaccatggaagagaagtcgaaaaaagaattaatattgtcgaggtgcgtctgctttgcatagatatacccaggtcagtgcgtcccgtataggtgggggatatttattttctattttctattatattggtgtctcttgttttgtcttttttggtctttctgatatttttggtcttttgcgtgcttatatatttatttattcgaatattgatttctacctgtcagtgtccattgttagtgtcaatggcctgattataatattcatgattcaggatactagtagaatctacgttcggcttcctatcccctccacttcctatcccttcaattctccgacatgtggtctattcgcacgagcacgttggacgatcatctcgcaagctcactataatgcactgaccatcccccctagtgtcacaattagcggactacagccctcctatactcggcgctaagagggtccatacatgtccaccaactctgcttcaacctgtacgttgtaattgccttgatgcatgtgtatcaccatgactaccattccccatggtccccatgtatctttcaaaatactccatatactgcataactatactccatatactcctattatctatgtaagattccctaccccgatcttcccttatcaattcactagtgccccgtggcccagagattggtcgagatttatggatcggcccagccaaaaccggtttgttccagattctcctagcctgtggcaggtaagaagacgctgcttttctttttgggcttgccgcgcactggtaagggatacattgcgccatgcaagtgctagaagcataatatccactccgccatcccttcgactacaccgtgcatactccgtcgattgtatatatgagattggggctagaaaatacaaagggggtttcaagttccgctgggaactggagttggtgctaccggccgggaggtggctagagcgtagaggcaagtgtctagaatgtcaaatagattgatcatacactgttatcgagatttttctgacacctcccgggaagttatctgcggtggtacgaccgagggctttctttcccgcgacacgaccgtggttgccgatttcattattcgggttttatgtatggaattctacctgacgtgcatacggaggtgtaggtgtgcattggaatctcctaggtggtagtagttgtaccctgtgtgatcgggggagttcggtggagactctaccataccttgcgtgttagggctccgccgagggtgccgtaaaatgccggacccacgagaatggagatatcgagatatggatgtgcgattgttcacgtcgtatgattgccctatgatttcccgattagcgtgctcactgaagaaagcacgaatcaagcccgaatccagaagccaatgccaatgtccgaatgcagacccgaaatcacgacttgcataaataatctaattcgagtggtaattccacgcggctagtccatgatgtcaaggtgcgtttgatagtccccgatgccttggttttgcctacttggcgggagtctggaccccggtcgctcgtgcagcaactgtcttgtactccaggatatttcatacataggaagtatcatgacctctgtattatttgatctttctttccatagaaggttgagtggcatgagaagtacggagtatatgtacgaacatcatcattgacttggctgtgaatctctagggccatatctggtttatcttttgctgtgccccgtttcatcccttcagctcgccatgtctcactaatgaagtgtcatacaacggatttatattgatctccattttattcattttatatcatttctatttcccgttccatttccatgccggagtacggagtacggacatagacgccgcccggaccaacccctttgttagcggcgcagagttttcctcttttgccactccattcaatgaattcccaacaaaacaggtggcttttagatggcgtttggatgccacttgctagtgtgtatgtacttttatgatctcctcggaaatgccagattggcgagcccatggcgcagtgggtactcggctggagtcccgacttcttaactgctcgacaagtctcgaactttcagatctgcatacctgaggttgatctccaggttttcaacccctccttttggacctttggagaacgtctggagtcccgcaaaaccttggaatctatacggagtagcccacgggcgtacccgatcatttcccatatgaacgtctcggtgagcggcaaggtcgcagcattccgagcggcagggcgataacgtctgtttcaccccttgtcgagactcgagaccctgaaaacctgaaaacctccgtgcgcttttgtttttgttttcttttctttctttttcaattgttcccggattcgaacccctcggtcctccgcctcacgggaaacccgcattgtagaaagtcttccaaggttatagcgaagcggtgtatcctgtgctcagaaccttgacatcagagtttggccttggaattttactttatgacggattgcaagcgcttgctaatcgactattgaaaggatcgcccagattcgatctcacctggcacattgcaattcccaactaacttggacctcgcaaatcgacacattcaccggagtgatgtgatccttgcaattcgccatatctcgctggcgacagtcacaaactgcaagtcaccccgagggcgttcgcgtggctgaactctgacttttctgggtccagctgggtcccgtaccgagaatcatatccaacttactgctaagcataagcttcccctgctttgccttggtaaatacgaacgctttgggcagcggcctgtccaggttgaagttgagtacgaagggaattgagtagcatgcattaacgagatgacagaggggcagggcgtttctggagctctacaacatagctaccccgcgtcgatttgatacgtctcgcagctcttgcattgatgcatgcttttgaactcggagttgatgcgaccggggccccatggcgacttgtgttatggtccaggttccccaaggtttcttaccccgcgagctataccccgggattcgcgtcgggcagttatcagtctggatctgccaatgggatatgggatatggctggtacaatgtagaagtagaatctgccagatatcccaaccacagaccaagatgtgtatccctccgatttacctctacagttaaaacgttgtaatcaaccatccaattcatcatgtcacacaacatccacattccaacccgtttcaaccctcatatctcacctccatagcacaagatagagatctcaacgctgattggccgatagctcaagaataagaactcgcacgcaagcaacgcatataggctgctatgtatgcaatgtcgcacgtcacgcaaatcccagccctgcaatgcacagcaccgagcaccacctgaccttctacctttcaacatccctgttctgcagttctcaaggggcatctgtatcccggacgttgtatctcagaaaaaaaaaacgaagtggcaccaccgtacggagcacacagcttgacatccaaccactagcaagacagacaggcgatcaggaacagccgctttagtcgattccgtatacatcggataactaactaggtgggtatacaacgtacatgatgtgtactaactcagttgagtgcagcacggacgttagtcgtgcagatgagatgagatgatagtaacactagaaaagtatacttccaatatactctctctaactaccaactagtctctttcgaatttagcacacacggttggatatcttggctagaccccacgcttatgcatagcatgcgatgggcgattcaaaaaaagggccaaagcaacaccccaagattcgacgaccggccagaacggaggcgctgctgtcagtgcgcgcgcgatcccggagctaactacggagtacgactcgataggccgtggtaatagtggggggagggcgtgaatcgctttagttagtctgcgcgggcgtgcataagacgctgcattagtgcggcgaactaacagcgtctctatgcatgaccgacggggtcagtgcatgttcgctgtttttctgggctgggggagcaggggcgtgggtttatctcagggggtttcaggactttgtttacactttgcgcttgttggatgaggtttttggtggcttgttctggggaaaatgatgtgcaacttgcaggtgtaccccgacgtcgcggggtttttctctctccacatttgctattttcggatatgggtggttggcaattcgtctgacatgtcgggatttgggaggctagtctgatgtcgatgtctgttgagaatgtgctgttgatattgcgattccgtgctctcggctaagttgtcatttgtgaggagtccactatttccagacctaaaaatggatggcaatctcggaacccggatggccagatatgggtagattacataacagtcaagccactcggctatctccaaccgtcataatacgccggggcgacggggattggctgcgtagggcccgttatcattccacgcgggagaggcgttctccgtcgtcagcgttatagaacgcccattttgaatggaataagttctggatttggggattggaccgatatccatctgttcagacgcattccttgcagcttggaatgtttcctctgtagatgcacagagataaggacgcggggtagttggattcagctcgttccctcgggtgggtcaaagggtctgaaggaataatgatcgctgctaggttgatctacattcttccttgtttgctatcgacgattatgcattcaaacgtcattttgtaggccaatcgtttttatccctagcgagacgacatctaagagggaaacagggatattctaccatgtctatcgacccgcctacgtaactggcctttttatataaccagaatcatgtacaacataactaggagtatttaaatatagaatagaagcaccggccaactacgtattcttgtactaaatcgaaccctgggtactttagtttattgctccgaacacactaacaatccatgaatgttctcggattcaacggattcctatcttcggacattgttgtatgcctgcgcccctcaattgcggggtgcatctgccacctcatactgtccgagcgaattctcactttacagctgatagtccgaggtgctgtataccttcccagtaggtaaacagctgacaatgcggagatagggataggatcacgagacaaggtaaacctaccttggaaccctcaactgataacgctagttgacgaatagatcctctgatcttcctgccatccaaggtctcgaagctatactccattcaagccacagcgggcgccagtgacccggccctacaagcggagatccctggacacagaccttccccacacttcgacctctcacgctcacgcaaatgatcacgacatgcatctctcaccgggagatctgaggaaagacagcgtcggcgttaggtttccacgcgaagtcgtatatcaaactccaagacagagaaacacaaattcaaaccccgtgcactcacatgacacatgacacctataatggcaggtgtctagttccgacgttccggcctcgcaacagtgtgctcagactccaagcaaatggcatttcaaagtcaattcttcgcttcctcgcagccaccccctcaccgctacccatgataaccagtcaagccatgggaataatggaaactgctcatgtccgccacaagagaggcgaggtctaaacgacgtctctcgttatccgcctctttttttcccccttttgttgggactcacccccgctcccactttccgtggcgggccaaggactatactacagctcgactgaaactctttcttctcggccggcctggtatgctcaggtactggtgctcggacttgtattgcgttgtcactggaggtacctctatctctgtccatagaccgtgcgtgttgtgcttccatggcgttgagggacgtgtcctgcatctttgccgccactgtgtcggcgaatggggcctttggtcggggagatggtgaagaatagcacagatccctatagtctggtttagaataggtttgtggacttttaagtcaccggtatcgggtgatttgaatttgactctgttgaccgcttgatcttctgtatgcggggaaatggcatatagatttctggctacctgggctgcctggacacaatgcctttgtttagcatatacgcgatagcctttcatgtggaatctcgcggccgagtgatcatctttggaatttgatcaagactgacaccgaggagccacagtttagctgatggtcaattagactcattcctatgcagttgctgatattcttccgctctagcagttctacctaggctacatattattccaattcgaatctcaggagtcaaagggaatcttcaaagaaattgcacggtgcatgcttagatatatgtattctcctgaaacctcagtttgctattttccgcctaaggcccgcaacctccaaagatctcatgatggaatcaccatcttcgatcttccatctaccacattgctatgttttctcaagtttcatcgggtgtgcaaaaactacccgtcgagaaccactctgtaaaagtggcacaagacaaaattctctccaggcagtccagattcaaagtccgaaagagagtcgaagttgaagttgaagttgaagtgttgttggaagtgaaaaggtgaagctgtaagcgggagatcacccattggtggagccaactccatcccacattcacgaaccttggtcctcacctctgtttacttcttgacgggacttttccaaaacccgatgtctcaagttcaaagttccgcgttggcagatcttgagaaagagctggtatgctcggtatgtacttggccatgccaccccttgcatctctaacactctgccccagatttgtaccgagctcctctaccagcccctcactctcctcgactgcctccacaccttctgcggatcctgcgtgaaagaatggttctccgcacaagggtcgcgtcgctcccatgcctcgcctcgatttacctgcccgtcctgtcgcaccgaagtgcgcgacacccgcccaaatgccaccgtcacgaccctgctggacatggtcctgaccgcgcaccccgagcgtgctagagctgcagatgaaaaggcggaaattgctacgaggtacacacaaggcgagtcggtgttcccggcacttccttcgggcggggagagcgcggaggatggcgaggacgatagacgcctgctggaggatgtacgcgagctgagtctacgcgaaagccgggcacaagctaggcgcgaggcccggcgaacgggccagtcttcgcggacgcgcgagaggagcacccatatcgagaggcctgcggaggacgcccggtcaaggcggaggagggatgaggatccaacgcggcagccacgtacgttgcggcccgatgattcggaccgtgcccgacgggttgagcatcaatctagtctgcgatcattattgagtttgtcatctgatgcggagactatggaggaagagatcttgcggcaaattctcgaggacggattactggacaatatcaatcttgagaatcttgggccgaggcaggaagaggaactcagtgaacgcatcgcggatgcttaccgtcggaggcatatgcaaaggtcacagtctcgccagcgacaggaacagggaagagaacagcggcaagagcctgacggagctgtgcgaacacattctcggtcccagtccgcccagctgacggaaacaatggcgactcgagaacataatggtagacgcccgccactttccagaccgcatctgttggattcggctcccgcgcggccgagcaccgcgggccatccaagtgcgcgccgaaggacctcgcccgtccgaatgaacccggcgtctgcatcggatgaagctataaggcctgctgctagatcctcgagtgatgtcactacggaccgccacctctctcaggctggacgcttacgatcgggatcatcatccaccaggccgcgacgtgccacagagtcagaacagaacatttctagagcgtgggtggccggaggacgagaacgaagctcttccagaccgaccacgagccaatcagccacgagctttcccacttttagcgctgcgccctctaattcattccgccatacgagtcacaccgatcatacccttccagcattatcttcgccccttgttccagtccggtcagacagacgaacgagaccatcttcgtcccgatcgaatgttcctgcatcccccactgtacaataccccgagccatccatctcctgtgaccgttgcggaaagaacaacatccaatataacctacacaagacatgcacaagttgtaaggaagggaacttcaacctgtgtctacaatgttaccgcgcgggacgtggctgtcttcgatggagtggttttgatgcctccgcacacacgacctttcaacgaatcatatcgtcgtctactcgacgccctttacaaataaatgactccggccatgacttattgtggttcaaatacctgcggccctccgagactgcccatcaaaccgtgagcggggaaaccaaaatgaccaacgacaacccagcccgccggctacaaagcggtctcttctgtgatacgtgtcaatcgtcgacaaacgattgtttttggaaatgcagccactgcaacgagggagactggggtttctgtaactcctgcgtcaaccaaggacgatgctgcacccacgccttattgcccatccggcgcattaccaatagcccatctccaccagcaccgtcccccacatcaccggctggatcaaataccctcacgtcatccgagatcgagagcttcaaaatcctctcattctcaaccaactgcgatatctgcacatacccaatcccagcctcaaacacccgctaccattgcctggaatgcaatagcggcgactacgacgtctgtacaaactgttacctcaaactcgtggcaacaggcaaaatcaacaaagagaacggacacaacggctggcgccgctgcctcgccggccaccgtatgatagtagtcggcttcgaagaccacgaagaaggccagcgccgcgtcgttgtacgcgatctcgtgggtggccgcgctctgaaagacgagcacgtagcacaatcaaaatcacaatcaccaacttccccagcatccggttctccagtcgcatccccagagctaggaaccggtgactggagctggaaagaaggccccgagcgccgtaagaaagcatcccgtctgcgccccggacatgcccccacaaacagtatcaccgggaattattccgatccctcaaatccagcacattccagtgccgcaagtccggttcagggcatcccgcccttccgccggttcccgcctgacggtggtgtcgggctcatcgtccatgccctgtggtcctggtacccggaagaagaagtcgaagacgagcttgtttttccgcgcggcgcgcatattaccgaggcggagaatatcaatgatgattggttctggggatgctatgctggtcggacgggactgtttcctggttcgcatgttgaggttattggtgagattcataggtgaagtgtcttggcttttttcttttgcttttgaacatcacggcagatatgataagcatgacatgcatcgtatcatatctgtttttttttgcgtttcttcgttgcatggttacgatatttatgatgatcggagttatgaatttggatgctgcatgagcgtttccgagcattgcatacatagcatattgttacttgttagattcaacgagccatgggcttttctatgtctataccgtgatattatcgagcgaatatagattctgtgatgtatacctacataccaccacgccaatgagaccgccaaccagtattcccatacagacacgttatttcactactcatattccattcattcctgtagtcttcgttattcctgagaatgtgttggttattcctgtcaagataccagatgcctgtttgttgcggcatcctagctgagttcagtcgtttgtggcctataaatgtgtacataaaaatgaatttatcaatctcttctcctttctaaagcatactaacgatgactacctatccatactacctgctttactttctggcaatacgttagtgaaaccattcgttcctcaccttacattcattcgttggtttaattatctcctagctaattgccttcttctaattctcgaacagtggtccgcggtctcggttacagctgctgctggcgagtttgaccctgtactcagtgctccagggtaattgttgtggcagacacatccagcacctcctcaatctcctctccgccgtcgacggtctaaactacctaaaccagtagatcctatcacagaaggccatctaccagtaaggctgttcttttggaacgcagcattgctcctgtattcctacgactgggtatatagttcgaggatcccgtggggccaaacagcaagtattagtatactatcccgtccaccattcgctcaattaggccgaaggctttagccgggtcaagttgatgctccaccatcccttccgtgcaatcgaggaactactcgagtgagacggtacccgatttccctcattcaccgctacataccagcattgcagccttgtacacactcatccccatgacgtctacgggaaggatctaggcgaggagacagaggagctatttgaggaagaggatacggtccccgccgataaggagaaatacaggccaatagtactagaaagcatcgtaacaatttcacgaaaatagggtcttcctagtatatttgtatagatagagagctctctgtcaccttctacacatataaaccaggaacagccatcgggcaggactcaagcgccggataataagcggtagctaaaggtcatagagacattatcctaccaatccaaaagccgaatggaataagacacgagctacgagttcactgcgaatataagccaggaaacagattcaacctgcttagcctgatcaagatacgccaggaccaaggagtcaaatgaaaccctgacgacatggtgataaaaccttagcggcacaacggccgggacgtgatggtgcgcaagttaaagacccggacgcacttggccagcgtgcgccaccaattcgttcttcaaccggggggtattgtttctctttaatgggttatccaaacttctgtaattgtaactctgattcaacctgtctgttcatgactcctattaataatctcttgtggccatgaaagccaatctcgatatttcggatccaatacagagtataattgggtcataaggcgcgagcttagaccttccatccaccacatccactcgatctgacgaatagatgcgcaccaatgagcaaagataatgagtgcaatcggtgcttcctggcgcagaagatttaaatattcatccgagacatcgagcagccatcggaagatatccgcggtctcgagcctccgcatgatgccaggtcttatagctaggcccaatgttcgggcaagttcatctaaagcctcttggtagatcgaccggagtgatgggtcagccgcgcactccctccatatcatttgctgcaactcccacacatgcggcttgccttgctcaagggcctgtggcgagcgatgggcagcagctaaataagctccattcgtgaagatcggtgccagcctcccggtacgaagatcctcgccgccggtatggataacagtcgttgtccctcggaaaagacgggcccactctgatagattgccgcgctcaaacaggaccaggaaatcgccttcttccgatggcttggcgcaggagaacatgcacgttaaagaggagaaaatgaaaagtgccgagccgttttctcgtgcgagcggtgagacgagcgggatcatctctctcacggcggtgctgtggtgcatctgtgcgtgagcgaggcaggctgcacgtcgagattcgtcggagcgagctagatggagcgcagaaaatgctagcaaggtgtgcaatactggcggcgttgcaaagccgattcgaggtgcttcattgcaccagacagtctgcacagtgggactgcgcgatagtgtgtaacaggttgacgttgtccagtgatgcaacagttccaggtcaaaaacagccaatgtggaagggaatggtcctaatgaggacaggcttggcaagacttgggagacttgtgctagggcacgactttttccagatgtagtgctttctgggccagatagtgacacgggtgactctgctgagttcgccggtgtggaaagcacagttgaggcactggtaaaggaacaaaccaccccgtgcttctcacaatttcggcaatgtggctggttttcgtcacactgatacagaattataagctagagcgcaataggaacattgatgaatctctcaccttgacttttcgctttttgcattgtaggcacccagatcgcgatttccggtgcgaacgccggcctgggggtaatgtggtcatttcaatcactagcaggtactatgaatatatagaccccgcgaggcatctaacatgtattgcaccattgagatggaatataggaggccaatattccgtggttttacgggggcgtctcaaatgctgggggctgcgctagccgaatccggttagcgctataattttggtgggggcgaagcatccatgggtgtattcttagtatggacctcacgatcgtgataattagaaagaagcataattagttatgctgtgtatgagctggaataattcaaaacagtttgaaggacccatatttagagagagagagatttccctgctcaaatgaaagaatattcaagtcacaatcttgaaggtcaccgaaagaaacaaagcagcctacgagaacaataagataacacgccctcaacacagttatacgatttccaaaatgatacttagtaaaagactatcagtattgactatctagatttaagtatatctgtgtgtagatatatatttcgtcgaatgataaaccatttcccaacatgaacttcaaattatttcgagtcaatcaaatcttgaacatctagatcgcagtaatgttgataaccatgcggttttacataatgttgtccgcaaccgtctttgatctagagcctgcggccggacaaaacggtcgaagtcccgttccattacgtagccccgcatctctggtatgctgcacctccttgcatatgtaacgtgtctcgataagacaatccgccctcataacataggtcgagcacggctctccacttggcctgcatgcatgacatcggacgcactgcacagtatcctgtcttgaaccctgataactgaccgctcttcttgctcggtctctttaaatgaccgaatgagcacatacattcgtagcatcaaacccaatatcagcgaatatctggcaagatctcccacagtaagtacttggcactctgagtcgcgctagcgcatactgatcaactcatagatgcctcaaggaactggaagcctgacaagcgacaaaggacgagtccttggtcaatttgaagttgaaggcgctcagtatattttcgtgggcaatttgactggcttcgggcagtctttctcccttcccaatgccgacgtcacctatgagtcagccgaccagttacacaaagaatccgaagaattcgaaaggttgcccgtagaaaaagaccagattgaactcaggctcaagaatggggttgcaatcacaggcggttttgatatgccatttagcgatggcgagatgaagaaagcgatcattgtcggcggtggagggaaatgggtgaagttgtgatttgctgagtcatgacttttgaatgtttgagagaacttgcaatgttggattgaatgaatcagaggataataaatcaaggggttggaagtgaaacgatgtccacttagcatcagtatagtggaccgaggctatcaaacttggcagtaaggcaacaacaatctctttaattagaacccacaaggtcgaaccctgaatacgaaacgtcctccactcgtgaagattggcagacgtcaacaattctagaaagccggcagggctgtgaacgcccccaccttactgcgccacactcgagccgagctgccggcatataaacagcccctcaaccctcagcccggaccatttatgacctgcatacaacgagccgcagtctaccatgtcttaccaacctaaccgtgagtggcatttcaaatacatttctagtcttgacaggagctaactcagtcaatagaagctccgtatggaggatacgcgccccaatacggacagcaaggcccgcctcaggggggctatcagcagccctatggtgcccctcccccgcagggccactatcccccgcctcagcagggacattatcctcccccccagcaaggccactacggtgcgcctcctccgcagggagctccttacggcgcgccacctcctcaaccccacggataccatgcgccgccggcgcaacccccatacggccagcagccacatggctatgcccctccgggccaaccacccgttggttacggcgcaccaccatccggcggcggttttccaccccagggtattccgtcacagccgtctcccggctacatccctggtcaactagcaccaggcgagttccggccccaagcagatgcgcttcgcaaagcaatgaagggcttcggcacagatgagaaggctttgattgcagtcctcgcgccgctcgatccgcttcagatggccgctgtccgcgacacatactccaagcaccttggccgcgatctgttcaaggatgtcaagtctgagaccagcgggtacttcggcgatggcctacttgccgtgctggatggaccgcttatgaatgatgtcgacaacttgcactcggcaatcgatggtgctggcacgaaggagtggttactcaatgagatcctgctcggtcggtccaatgctgatatgaatgctatccggaccgcctatgaaatgcgacacaggcgttcgctttctaaagatgtcgaaggcgatctctctttcaagacgtccactctgttcgccattgtccttcgtgctgctcgccatgaagagtctacccctatcaacccgcaaaccatcgagactgatgttcgctccgtgcaagggaagaacgtcacagaggtttgcgcaatctttgcccaggcctccaatgccgaactccgcgctattagccagactttcgagtcacgctaccatatctctctcgagaagcatattgagaaggcattctcgggtcatatggaagatgccctgctcctgatgctccgcacggccacggatcctgccatgcgcgatgctatcctactcgagcaatccatgagcggcatgggcaccaaggacgagcgccttattatccgtgtagtccgggtccactggaatcgcaatcacaaggagatggttaagcgcgcttaccaacacaagttcgggaagagcttgattgaccgcgtccgcggagagacttctggtgattaccagcgattgatggttgcccttcttgagtagaaggcttttttctttctttttcctttttttattcctgtacatttatgaccttttcctttgttcatgatggttacatttattctgagataccatgatctgacatgaggaatgtgttacgcgagacagatagtgatgtgctacatacagtacgagacgttaaatatattatattctcctttgaccatcttcggaaccattgtatttgcataaatcagattaacggtgtagagacccggatatttacaagttaatagtccacttcgtccgcagcctctctccccaagtttggaacaaaatcggtataggcgccattgccaaagcaaggaatgccagcaaactatttccccacccaaggccaagtttctcgtacatttgcaatccacacagaggaaggagagccccaagcaagcttcgcagaacagtgcaggcagccacagcacttgcagcatgtgcaaggaaagcatctaccagatatgtctgaacacacatcaatataacgatcatcccgaaaccagtaacagcatttccaatctcgggaacgatccaatggaccactttatctgtcgaccatccatagataaagagacccgccgggatggccaatgacccaggtatggtaaggtacaagggaagtcggtcctcggggataggtgtctccttgcgcgcgagtttgagtttgattttgcgatcactcaacgtccccacgtaggcaagatcaattaacattcccaccccgcttcccaggaatgagaggccgctggcgctggcagagaacccatactgaccctcaaagacaagtgtgaatgttgtgaagaggatgtagaggaagccgtaaagaacggcaatgtagctggacattaatgccactatcggggacagaatgagcattttagatggacgaatgagactccgcaggaagagctgttttggagggactccggtgtccaaacaagatttatatgccgtatctcctgttgactttcgcagtcgagcagctttccgctcaaggaggattggggcatatgtctcaggcacagcgaaaaagaagacgatcgatgcgactccgccctgaaaatagttagaaatgagacagacccttttaacctggtattatctttcttaccgtgatggaaagaacccaaaacacccatcgccaatttgtagcctccacgaggaacccacccacgacggggccaatgattggaccgaacaggggtcccatggaccaaatagccatcgcctggcctcgtttctctctcggcacaagatctgcaatggtaccactaccacatgtgatggcagcgacacccgcaaacccgtcgagaaatcggaaaaccaccaaggacgccatattgggagcaaccgcactggcgatattgaataccacgaacaggacattgcaaacattgtagacccatgcgcggccactatactcgctgaccggtgcgacaaccagagggccgaaagcgaatcctagcacgtaaaccgagaccacgaaagacgagaggagattagatgttgtaccaaagtcttcgaggacttgtgtgatacccggcgcgaacatcgaagaggcgaggggactagtgttgttaggaccttggtctatactagatatataagtaagtactcacgtcaagaaagtgatgaaagaaaccatcccaataatagtccatttgcgtccagaactccagttcatcggattctcagggtcctcgctggctggctcttcccagaagacatcgtattcggacatatccgccgtgtattcgttggacttctcagctgtcagtacggtagattgcgcttcaagatcagacgattttgtgtccatgtcgagggcaccgtgaagacaaatccacacacatgggctcttgggtgcggcgacgggcctttgaatgatttcaagtctgtcatatgcaagagatgcataattgccaccggactttccatatccgttcgcctatcaaagggtgcgtatactaaattaaatccccacgttttagaccgagggacttcggattcgtatatctcgtggggtccattggctaacgtcggacgatctaaacccggcttcggcttcgggttcggattcgtacgagggtttgacgtggtggctgatgggattcgggttctcattggcgctaggatgaactaattaagcttggccgttatgcttcaagatggcattgttacagaaatatcattatctgcgatcgacgcgtccccgatcaacatggcctacctcggtgggtcaagacctgcacatataaaagtcaagacccccatttcgcatcggactctgagataacctataagtgaacatcgagacagaatgggaatttttttcaacgtgcagcaggtgctgttaacggggctatttacggtatgtcatgcgatgccttttgacttcttttctaatgcgtccaggctatactatatcttgcctctaaagtgatctacaatgtgtattttcaccctttgagccggtttccggggccgttggagcacaaaatatcacgactgccatacgtctaccggtctatccggggaacccttccctttgacatgctggaaatgcatcagcaatacggtaacattgtccgtattgctccggatgagctggccttctcccaccccgatgcctggcaagatattatgggccatcataaagggaaaactgaattttcaaaggcagattggttctaccatgcggtcgaggaccaaccgtcacatgtagtcaacgaaaccagagagcaacatggacgtctccgccgacaaatggctcacggtttctctgaaaaggcaatgcgagagcaggaaccaatgattcgtggttatgctgatatgttgcttgaccgattacatgagttttgcgagtctggtagtccggtgattctttctgattggtataactatactactttcgatatcattggagatctggcatttggtgagccatttggctgtcttcagggatcaaaccttgacggatggatcaaggggattttcgacgccggccggcttggaattatcctgcaagctctctctttctatccacttgtgaagcggacgctactatcgatggtgcctgcttcaatgcaagaggcccacgagaaacataagcaactcaccgaacagaagatgatgcgtcggattgaaaaggaagagggtcgacccgacttgattgagggacttctaagaaagagagaggaattggtgagtatttaactaatttccgttcagaatgcaactgaccattgtcagaacctgagcattgaggaactcgttgcaaatgctgaaatcctcattatcggtggttccgagaccacggcttcattattgagcggggtcacttacctcctcctcacgaatcgcactgcctatcagaagttgaaagaggaagtgcgtactgtgttccaaagccaggaagagatcaacctgatctctgttaacatgttgccctacatgcttgcatgtctcgacgaggcaatgcgcatgtatccgcccattgcaaacggtcttccccgtgtatgtcctgaggccggtgcggaagttttgggcgaatatattccagcaaacgtgagtctcattggcgtgaatactacatattgatgtctgctgacggcgttttgaagacttttgtttccattcatcaatgggcactttaccggcgcgaagagtatttcaaagaccccaacacataccacccagagaggttcctgggtgatccatcatttgcagacgatcgtcgagaggtattgcaaccattccatactggaccgagaaattgccttggaaggaagtaagtattgacctagttgaccgcaagtaacaggcgatactaacggtgtcactagtcttgcatatagcgagatgcgtctaatccttgccttgattatcttcaactttgatatggagattgccgatgaagccattgattggattaaacagaggaacttcctgatgtgggaaaagggtccgctgaaggttcatttgactcgggtatagacttatttattagacgcaggaagatagattgaatgatgaatccctatttggcaagtgatactcagtcaggtgatcttctggataccccctccctctacttctgctctctctctcacactatccagcattcttcaactatactcctaaccctcccacgcatagcataaaattaggcttacttctaggagtattaggaaaagcacggatctaacttacatataaacactgtccctgtcaaatttgttgcttggtgatcagtcattcggttcctctggaattttgtcatcttcttacgcgcttcctatgcatctttctatcgccccgaatttcaccatcaacaacactgcacagatcgggatacatcctcttgctagttctgctatacattttcctagcgatcttcttataggtcgtcacttacgtaccactcccgagtcccaacttcctaagccgattagagaagtacactcggccacctgctcaattccccctatacagaaactatacgcgaatacttcaacgaggcctaccgaatcgagcagggtctgcccgtaaggggactcacctggtctcagggtcgaagtgttctagggcgatgaaacgatgaaaataattaaggtaattgattatccatattaagtcctgcttgtacaatggaaatcccacacacctcacctcttcctcttcctctatggcacatatcagtcatagcatcatgcacgccatatcgaaccaaaaaaaacaagtacatagaagcaaaacaaatgaggccctgagcgtaagccacaaagcccatgtcttcaaaacgctcaaaaaaaatcaaatttcgtcaaggcatatatatgggtatttttcagcgtagagtatcagtcaatcatggatctcataaaaaaaaagaaaaaaaacaagcagaagaggaaatgaaaatgaaaatgaagaagagaatcaagaaaaagaagaagaagaagaaaaagtaaaaacatatgtagttccactacacacttgctgtgcgtcgcggaaccagactgggcttctgagcgtacgcaatgaacatacggaacccggtgccacgcttctggcactcgcgaagcaccttccggtcattccaaatactcggaccggtatttccaatcgaggcaataggatcctcgtagcatttcgaataccaccagcgtccgacgcgggcaacgatcttagcgattgactcgtcatttgccggcgagggggaaggatcggagagcaaatcgccgagagagatattcgcgtcatttgaggggggtctcgaggcagttttcgtactttggccatcacccgcagttgtgacagatatggtgggtagcgagaatgcagtggaagagggagccattgaaatggagtgtgctgaggagctggagtcggaggatcggagcaccattcctgcgactggaattcggaccatgcagcgacggagactgtcgaagccctgcgcgccgagctcgcgttgtacgctgtcgctggttggtttcaggctgagagatgagtctgagaggcaggtcatttctttgagttggcggatcgctttgcgcgtgtgaggtcccatgttgaccatgtcgcggtctaggaggctcatttctagatatcctcctgtgcggagaacacgtttgcattcttggatgatgttgccttggactgtctcggagcagacagcgggaaatcgtagtaccgcgactgtgaaatagtcctttgggaaggggagagggttgtccagtccggcgtgatacacaatgtggtggttggtaggaggctcccatgcagcggggtggggaggcgccgcggatacaggacgtccacccaggctatatacctcggcatcagggtacgtcaaggaacagtagaaggaccagtcatcatttcccagtccatcaatcacaagaattcgcccttgtcctccggccttgacgtgattatgcgccgggctgaaaagaactcgaccgaatgacagccagcgactagtcatgagcgaagcagaacgcatgttagtccgtgtcactgcatcccactcacgctcggaagatgcggcttcttgttctcggtggaactttggtctgggggaagggacggcagcgagggagttaagaaatgtagactgctgttgacgacgctgatctgtcgaagaaggcttctcggtaagagcggcagcctgttgcgtcttcgcctcatttgagcctctatgtccggcaacgagatcactgtaagacggttgagacgaaggagcggtcgaagattgcaaagcagagacaatctgagaacgacgaagatgaacagagctgccactcgagcggactgaattaccactaggtactgattggggattattggcattactcaattcatcctgaagagccctgcttgccatcgttgcaagctcaaacctgtcctcttcttcggtcttttccgactcctcgggcttcggttgatctggcgacagaacgtggtcaataagatcatcatactcgttccacacctcgtcatcggtcggcggagaacctggaatcgggggcacggctgtaactgcagccagagctccagagctatctgacgaggttgagcctttcttcggcggaaattgaagaaactcataggttgtgaatggcccagcaaggaattccaaagcgctagtctcctcggaagcgctaaaagtcgggttgaacccatggccccagtctgaagattcgcttggaccaatccccaaattcaatggaacattggcgacaagtggagattggtatgagctttctgtcgttggaaccgtgagggaagccgattcggcaacactgaacggacgcgagaatgactgcatggcgggttggtgatttctatcgcgccgcgaaactacctgtggaatccgaccgacagaagccaagcgcggacgttgttcaggtagtatttcaggctccggggccataaggttgcgattgaacatggcagtcctcggtgatgggcgatcatcattttgaaactcaccgtgcatctttggcggagatggcaataaaattgacggctttctttttctgatgctcaagcctcttgggatttccacgggctggaaaaccttttcctcctctgttggtggtgagtcttcgatgttgttgatgatttcctcgagctcgtctgaatcagcatccaccaaggcgtaatgggccacgggccgacggttgagaacaggggagattgccgcatgaagtctcgcagtttgggatgaggtcgctggaggaattgagtccttctgttcgttggcacggttcttctggaagaagttccacacggatgtctttccttttttggagtgttgcttctcaacctgctcgggcttagggatttgttcagcgggcgtttgcgtacgcttcggttgctgtgaggtggcactgcttggctcatggctagggagcgacgtgtttgtgatagcagcctgggggttctcaaacatgccatgtctctttcctcttggaacgggcatgcgtgaccttgatgcgtttgaacgatcactcgcgttagattgggattcggagcccctacttcccattgatctggcgccattagaataacttggcgtaatggtctcaccaaatgcccccgaagtcgcgagggattcggtagactggctagtcgagtatgatagcagagtttgccgcggcaagttcgaagtggacgcaacgcttatgctgctgaagctctgctcgctttgtgttcgtgacaacgatgagccgtctagtccaccaccgttgataatgacgggctccaggcggctcattagaaagtcgtcgatttccaactccgggcgactcgactgactccctttgctggcggcactccgtgtcgtgcttgttgatctggttcttgtcccgctgctgctactaccgcttgctttgcggccgcgctgtccatactttccgtagccctcatgacctgttcccgcagctggacctttgcgagtagtagctcgaccttgctccgccaaattctctgacatatccggcttggacttctttgtgaacagaccgaaccgtttttgagttggaatttgctttgaatccggcttctctttgggcatctccttggtcagtgtccggggtgtctttttcgatagtacgggagatccgccttcccgagaagggacttgagagatgcttcttgattgcagcgagtctatcgatgcaacggcagactggttgggagctgggtgtggctgttgggtcgccataatcttttcgatcgactcgcgtcttgtgtggcccgttgttctaagataccgtaggttgctttgaacaatcggcgatgtttcaagttctaagcgatgcgttccatctctgctcggtcgtggtggagtttgtggtgtctccgcattccgtgagggggaatattccataatctcttgtgggtcaaacaaacgcctctcggcttcctccacttccttccgagcctgttcaacgtcgatatccggagcttttggagggctgaaattgacggatgactttcttggtggcggactgcggggcgggcctcggggaactgtagagggagatttggacgatggtactctctggccattgccggtgccgattgagcttgcgccagaaggctttgtaggaagtacccgtttttgagtcttgagctccggcctttcttgctgggcggttgcacgtgccggtgaaggagagaagacaggcaatcttgtttgcgacgtgctcggttgtctcagacgaccaatctttgtaataccgggggaatatgatgataatgatgttggggtagacccccgactccaaatactgggagattccgagtatcttgtcgaggggctacttgacagtaagaagggagtaggaggcgcgggcaagttttgcgtatcgagggtcgttcgaaggcttgccaactcttccggaccattgaacctagaccccaccgagttaatcgccagattactctcattcttgtggttcggtttgtaagaggaagtcgattgccctaaaagtgaggttgacgaatttccgtgtcctgacacattgttcataacgagagaatgaggctcttgcggaatgacaaggctaagcttctccgagtgcaattgctccacatgtttccctattgtcggtgccctccttcgtagaacattccgtgctcgttttggcgggggcaattgttggccagcaacgaagagcgatgttctgttaatctccgggctcgaaagcgtcgagtgaatcggctgggtgggattcggagaagaggaagcagacactggcgtatttggagatgttgtgctaccaatgctggggcgtggaagcatggacaggcgatttccacgactagtagatcgcttgatagccgacggcgctggtactgggccaataccttcagcatccgagaatgacgagcttctgctcctaggggtgtgattggctggtctcgcaatttgagatctcggaggtcggccataggcaccagcattgggacgcgataagtttgaagaagaaggattgtgtggcatgtgatgggcagaactgtacgacatggcgtacagatgagtgaagttcccggctccaatccaaggacaaatgattaaacggtgagtacatgtacttcgttatagtaaccatcacgccgttataggggtatattgctgtctgatttaatcagctctcttcaatttcgtcaaattcaacgtataagctcacggcatctgagtcacgtcaaacgaaaatatcaatattgatgggcgcctggcgctcgacagtgggggtatagaattaaataaaaaatagaagaaattcgtaaaaaaaaggaaaagggtatctcaaagtcgcacaactaaaaatcaagtgtcaatagatattacaaggatgtcaagaatcataaaaagaaaaccacatggactcacagacgtcagtagataaacgagaaaagtccactgtggatcgaagccttaaagctgcagctgcttcgccacagtctgcagcaatgtggcgttcgatttcagggttgttcaccagcgctggccacgtcagagataaaatccgactgaagcatgtaaaaataaatgtcaaaagattcaagacaggaatttccgagatgccggagatttatgtgactggggttgccgctccaatgtgggggaaaaagccttgaaaccggaatgcccatgtatgtagtaagagcgtagggatctcattggtacgaaagtaatgtgactactgtgataagacgggaagaagtcaagactgcgaagacctggagcctgtcagaaggactagcacgttgcgaaaggtggtgcttctgaagcgacgacggtccccatcgcaaagtcaaaaggaagttctacaaataaccggggcgatcccccagtggccggatcaagaagattgcgcgcacggaagcccacatgaggtaaagaccggtccactcgagggttctcccctagcagggacttgtcgttggctgctttgcttagacggtatgggctcgcggcggcaaacagggtaccgggctagacacaacgtgacagggcagtggtacaatccgtggcgtatgggcttttcgtcatgcatggcttgagcgttaagaaaaaaaccctacaaaccgtgactcgttcgcgatgtcagatcagctgatagactcaagctgagtatctgcacagtcggaactgcacatggatctagcggacaaccccgtattgaccaggctttatcgcgtctccctcgcctcctccacagcacattcggagacgccgaacaagtcaatcctaaataatgaaatgatcgacgcggtgattttgattttcgttctttttaattttggcggtttgcaactccagcctttcccgctattcggagaatttcccaacgtggtttcaagggaccatgcatatgcggatagacgtaagggtggccctaaaatgcttcatattttccgaaacagtcttatatattcccgatccgatatgtctgatatcgtatattactctgagacatacctttccaacggccgtagatatcaatagtttggtacagaggcccgtcccgaacctttcggggaccattccaaggttcaaggatgaaagcaagcgaagagacttaaagttgggtctagcgtctaaacttgtacaactcgaagagccagtgactgtccgtagagagacaatttcgtctatagaccgggttcgatactcgagccgtggagcctcgagactgtggagcccgctagtcactgggctgtgatggcccactgtatcatggagcaatgaacaagccctggacgaaaatcaaatgttagctccaagccactgtctaaaaaaaggccagctgtcggttgtcattcgcggggaggacactgatccaagtggggagggcgttaacttgggcaataagaacagcgaatgatcacgaacgagaaatgagtctgaaatggcgttgaccagtgtgtgttgtatattgcaaatgtgatattgtatgatgtaccgaatactccatacctgatgcatttgatgtcccacaatcacggtctggtccatcctcgtctaatgactggccatagccatgctgcaggaacaagcgactaatgcacccttcagctgacttcgcacagtcaccgggaatttgtacgaagtacggagtagtctccggggaattattcctgcggcaagaaaagttagattgagttttctccgaggtcagtgcttggatgtgggaatggagaggttgagaattcagaagttgagaattctccatacacgtgaatcgccttcatacggacatggctactttcgctctacaaaccagaaaacccacacttgcacattttcattttgagatccacatatattaaaacaaatagaatggaatgattgaccctgaaattgcccggtagcttatcaacacacaaacgccgatgatgaaagaacagatgggaccgaagcccaagtcaaagaccagacaaagcaaatattggaaacattcaagcagcagctgcaaatcgcttcttgcgagcctccatggccgcattatccttctcactccatgacttctgcgcagtgttcgcaccggcattaggcttctttacgccggcattggtcctgttaccaccatcagcgcggtcaccgcggtcaccgcggtcgccacggtcgcggttgcggtttccatccccacgttgacgatttcggttgcgtccagtatcacgtctctttcccccacggccaccctgctcgttgcggttgtcgctgcggttttcgttacgtctcttgcgggagcgctcatcaggaagtgcctggtcgagacggcttaaacccgcagctggagtagtatcagcttcggcacccgtaccgaaccgcttagcgcgttccagctgctttgtagcctccttcaatgctgtgtcgtcatcctcaacaatgccaaacttctgcgcgcgagccttgcgcttctccagctctgcctccagatcggtctggggcagtcctcgcgtgtaatcgacggcaggcttctgttcgaccgcggcttcgggctgagtggctggttcagcaacggcgccggtcgtctcgaccttcaagtcgtcggtggtagcgggattttcgtcgagctgctggttggggacagcaacggggttggaaactgcgccctggccaccagcggcaatcgcagctgcgccggtttctgtggatggctcgataaccgtctctgcaggttcgtcgtcccagtcaatgacgtcctcgggcgcgtcagtcttggctgcggcaggagctgcggcaggagcgtcggatggcttgctctcatcatcttcctggaggcgcgaaaccatgtcggccttctttccagtgtgtgggagagaacgagtcttaaggatctcgaccaactcggcgttggtcttcttgctgtagtcggtggccattttgcgatcggggataggtaggctgcaattggtgggagggagagggtagaagcagaagtgattgtgataatgatcgaatcctgaatattcactgcaaaccaaatcttatacgggataaacaaaggaatgaaagttggagtgctgaaaaaagacgcccagagacgcgatctcacccagtggaggtccccaggtgcaagtacaacaattacataatcgaactagaatgatcccattggccacgtgggcaccacgcaataaagccagatccagacgccgacttgtttatttctcgagattattcttatattcaacaacctatattcttcaaaagagtacgatatccggatctaccgaggcagctagatggtgtggcatccttagaaatctagacgatgtttacgtccacaggttgtacacgatatatatatctagcgatagcataatatcgagggatcggcgctgaatacctatgtggaagtactgaaagctctaggtgaacatacaattgagactcggagctaaggaccaatacaatatgacgcctcttcaatgtacgctcgagctttgcaaaatctattttcattgccagctaggttgcttcatgcagcgatcaatacgccacactgcagaggctgttggagtcgagctggggattcaggcgaaggcaaagagcttgtcgagaatttaacaggcgctttaatccccgaatcagaggctgacagatgtacaacgtacgatgaaccacgacagcttgttgggaatagggatctgcatgcactgcgccacaagagaagcaggctactccgtacatcacacgccacattgtttcctcagacgtcgcatgagctactaccataccgttctagggttgttatcaagatacggagtacaaattagacgaaaagcacacgatagttcaattcgttcaatcgatcaaaggaaggatgaaacagaaacccaaccctgcgaaggatactcccgtgaccagtaaaagttgtgtcggttgttgcaagctcttccgccctcaagtatgtctcaaatttcaacatccttccgctccagtcgctctaggaatcggtcttttatcctgtcgagtcgactcaagatatactgcctgttctgccaccccaacgagagtcgtagaagcttgtcaccactaagatagacacgttgccaatccatagcatccactgctgggaattcatcactgcgtagacagttgtcctcaatgaatcgacgtctccagtagctgttcgggatcattggatgccaattcggaaacactaaaagcagggcgtggatgtcctcgtgattgtccagatgatctgcgatattcaagatgagttctgtcggaagaaacacattcctggtcttgaacctagcttgggatcgtcgggacattggatgtgtgggtatggagggttgtgatcttggctcaaatcccatcttcctctgcatggtgtactcggttgtgtatttggtgatcacgtcgttcaagcaggggtcattcaaaggatctgcgccgcgaaactcaggaggcatatgacttggacgcgcatcatccttggcacgaaatttctgaggatttagatacaagcctgatgttaaattgtccaataacttgaaccattctagccacagagggtatgtacctgttggatcaagcaatggccttgtgacatcgtatggatcacacattgcgtggaggaagatatccatattcttcttgatcaagtcgacgtcgagcattcgagtcatgagcttccagcatcgttcgtgcataggaaatgctactgaatatgttagctccgagacgaagttcggatttggaaaggcgtgttgaccatcgctttggtgattgcacaaaatcatgtcgttctcattatgtgggaggcttatttgatgcgtcggctgaagctcgccaacaccagagagatggaatgaggatacatcgtcgtacatcgtaaagaacactagcacaacgctcaaagttagaacaaatcgttcaacccaggatgttagagaaacacttacaagctcggagcatgcaagaccatgtccacatctcatcgaagtgtacgtcgtccatatctgttgatcttccgtggatccatggaccattcgagaaaccgtcagcgtctttcggtgaattgcgatatatgagctcagcaatatcagtggtcgaaaagctgtaaatattctcattgcatagattgcaggcagtatgttgatgcagattaattggccctggagggatggttgacactggagggagggctagatgtcttcttccccgtcctcgatgtcctcgcagtcttcgacgggatctttgacgggccatgctgcttttatctggatacaagagtatccagagagtgaggctgatacttgataaacacaaaggttccttcacggtgtagaaaggggatgaggaaaacagagatgagataataatgaggatatagattacagggagagagagagatggagagaggtagggagaggccggcagatagaaggatgtcacctgcaaattcctgaggcagttaccttagcttgagcctcttgacagctttgatggaaattgacagattataacaaacaagtatgcagttcttctcctttcaagatttctattattgcgatcctacgacaagttacggtagggcctaggacatgaaggatcccgccaaagacatacatgtgggttttggatactcatcaccaagtactgctagatataagaaagaacctggatacctcgtagcatagttcgagacttcgtattggaaagatggaactaatctaacattgattgtcgtggaatgtctcttgaatcctcatcatggctctaaccaacttcttcctgctgttcatccttcttgaagaaaggccctcgcttgaaataaagccttccaatctgcctgtattcatcctctcccttgtcaagtttcattctgaactccattccgtcggccaggaactcactgaagcagttcaagtaggcgtccgtccactccatccagtctcctaatccttgcatcatcacgagatcgctcgtttgctgctccacttccttgtctggctgggtcacccattcaaacaacttcaggttcgggatcatcatggcccagaaaggaacgtcgggtgggttaagttccccgctaaaagatgggccaggggcgacggcgaggatgaattggattcgctggatattctcatggctgaatactctcttgattgtatcttcgcattttccgtgcaggtagacttcgaacaagttgtcgccataaagtatgtccaagcattcggcgctcatttgtttggaaacatgtaaaatgccagtccagtgaggactggtgttgaggaacttgtcgtcttcgatggacgtgtcgcgcgtagaaaccacaggttcaacaccatagggccgatacattgcgcttgtcactctgatggcgcatttccggggcacgcagaagccaaaaatttccaaacgtagctcgaggggtagcgtgaagagtagagacaacgtggaagcgggagttggttgctcagactggtggtctggtggggtctccattgttgaacttgcaaggcaagtttcaatcgcttcttatgtcttggaaaagtgctgactagagagtttagcatcttgaatcgttggtccagcatgttccagcgtgtacttcatcaaccagatcagatcgcgatcgatctcgagacagatgacacggttttgagggggatatcgaaagatatggtaaatatagcagcaaatggataggtttcataaaagataggaatgatgatagtggtctaattggcagctcggccaagtggatgaatagcttggatgtggtggatggtaaagcaaagctgagttgtaggaagatgagcctgataaatagtaatttgtctgaaaagcaaacgaaccatctcctacggcaactgccttgggaaatcgtcctgcggcgactcaaggctccaacgtccagaggcttccaccgttcttgatgttttgttctaacgatgagcctctcagaaaatccccggtcattcacagcccaacagaatacatatgaactggctgacttggagtagaatctgtcttttctttgaaatacctaaataactgcccgtgctgctccaaacaatcaacgttgccatatggccccagcctaacagaactaggcgttcatcctcgaaagactcatctcattccctccgtgattgtaagacccttaatcacatgcgatatcccttgctttcttgaaacccctatcaacttgtcttgattacagcaatcggactgcacagtgttgtagcaactagggtcaccaagaacgacgccgataaatgcgagccgggtgatcgttataaatcccagtggttgtcactgttgtatccctaaaagtatcatatgatgcaagctgacagctggtcatcataccacagcgaaagtattcggccacaatccctgtccaaaggcattccatccctcttggcgtttcatccacgcatcgaagatgtgaaggtaagtgcgacgaagatgaggtggcagcatacggatattgcttatatcctaggagctgccgaggactgccccaataagccccgagattcctgttgataggccaagagctggtggggaggtgggaatgttgttcttgtttcttctttttagtttgttgtaggccggactgagccatatcggtattggatgcagaacctctgaaccacctgggataactgattgactgagagatatctgatttactaattataatatttcagaaagatttcactttgttttcaagataataaagaatcattgagtcttttatctcatatagccaatttggatatcgtcacaaagccggccctaatgcgggggtaacaagtaggctgtcatagtcgcaaattctgagtctatgaatactatttgtacctcaaatatctttatgtatggcatggattaaggagtttattaagctagcaaatgaaaagtctaggtgcttcacttttgtggtcatttctagcggcagacggtctaataatcagagggagtggtaacttgttggtagaagcctgtttattattgcttaggaaaccaaaagaaggtggaagtcaatacaatatactaagaacctcgtgactgaaataagattctaaacaaacatgtcatcttctccaagcgcccggacaagccgaacagttgatgaaaaggagttcgcgtcgaccgggggtagtgtaagcccagtgacacagtgcaacgaggcgtgtgcaagcacagaggccaagtcgcgaggtccaaatattggaataatcatgacgttctgcaatgcagaactaccagcgattaaactggcaagaacagatactacacttgatctaagccagaggcaaagagagctgaagaagaaagaaaagaagaagaagttctgggggcagggccaccttcttataggtatcctacgggcggtcggtttatgccactattcacaaatgaggcaaacaacgacataggctcacttaatgtaaatggtaacgtgatgataaacacatatgcagatatgcctagatagactatgtaacatatagatgtatgcaggtaggtgcctggtattgtaggaaccaggcttaagacttatactggattcatggatgatataaaagaaacagctcacggaagaagaatcagacgttcactatacacagggcttgtttgaagcagtagaggtaaaaaaaacaggcacacaaaggagaaggacaagacataatagcacaacgccatgggaagaaaacatagagcatttagtacacccaagccagcgtcggaagttccggggtttacagatcacattgaggaaaataggtggttcctcttctctgatttttcccctggcacaggcgaatctaaccatctaagaggatgccatggaaaggttttctttgggtttggtttttcttttttattattgcgttgccaataccgtttaccggtcaacctcaccgaacacaagatccatagtacctagaaggaattcaatgttagactggaataaaagacaacggaataaaagacttaccgataattgcgacagcatcggcaagcaagtgaccacgagacacctgatcgaaaccacccaagtgggcgaaaccaggagcacgaatcttgcagcggtatggccgctcactgccatcactgaccaggaagacagccatctcacccttgggggcctcaatggctgagtaagtctcaccaggaggcacacagtagcccttggtgaaaagaaggaagtggtgaatgagagcctccatgttctccttcatggcagcacggggagggggtgagatcttatagtcctccacgcggaccggaccggcgggcatcttgttcaggcactggtggatgatacggagggactggcggaactcctccatacggcagaggtaacggtcgtagcagtcaccgttgacaccgacgggaacatcaaactcgacctggtcataggcatcgtacggctgcgacttgcggatatcatagggaacacctgatccacggagcatgacaccggtgaaactcatgttaagcgcatcggtagcgttaacaacaccgacaccctgggttctggccttccagatacggttatccgtaagcagctcctcggtttcgtcaatgcggtcaccgaactgagtggcccactggtagatgtcgtccaaaagaccaagggggagatcctgcgacacaccaccggggcgaacgtaggcagcgtggagacgggcaccggacacacgctcgtagaattcctaaagcacccgaggcgtcagtaaataagacctggccgcagaggctttgcagctgaaaactactcaccataagcttctcacgctcctcgaaaccccacaggaaaggagtcagggcaccaacgtccattgcgtgggacaggacggacataaggtggtttaggactcgggtcatctcgccgaacaaggtacggatccacttggcacgctcggggatctcgacgttcaacagcttctcaacggccaaggagaagcactgctcattcgtcatcatggagacatagtccaatcggtcaaagtaaggcagagcctgcatataggttttgtactcaatcaacttctcggtaccacggtgcagcaaaccgacgtggggatcggagcgaatgatctcttcgccattgagttccagaatcaatcggagcacaccgtgagcagcgggatgctgaggaccgaagttgacggtataatgacggatcttgcggtcgatcccttcggccttggattcaaggccagcagcatcggggtgctcgggagcacccttgttggcgacggaggtgaaggtcgggtcggtcggcacaagtcgtgtggcctggtagctagcagcctctgcgtggcggcgaggaacagaggtggctatcgagcgggaacgaggaatggatgtgttgagcgaggaggggcggaggcagagccttttgggcgcattgcccgctaggcgggcgagagaagcggccatggaggatagaagtggaggtccaagagggaaaagaggggagatgatcctcaatccaggcgcattcaatgggtggatatggctcgctacggggtagggaactcactgaaggtctcaacctgggagtcgcattttggctcgtcacgtgaaaagccgccgggtcatcagccgtgcgctggttggcctgaaggggccactatactgtgtgggtaagggctccacactagcctttctttggtttagtgccatgcattgctcacataatcttgcgattatggattacataatatatcattatttgcgcataagaaaggcctcgtttctgcctcaggcgaactagaaaattacttcgagaaatctctcttatcggtgatcgcggattttaccatcaaccttcaccagaccctctacagttgctcaccatggcgcctcttgttccctcgcaggaggagctgcagcgccgccgtgtatgtctccaacaatgattccacgcagctcagaatactaatcgtcccagatcatcggcatcaatgcggaaaccgtcaccaacatcccctctacagattttcctggtcactggcccggagagtcgcatgggtgggcactcgatgaattcaaggaggtatgtattggaacatagttaggaaggtatactctactggatttagtaaatcctgaccatttactccaacagaatttccaagtcgaattccatcgcaatgaccggttcgaggcttccttctcgctgatcggtctcgacgcctcagtcgccaacgctttccgtcgtattcttatggccgaaatccccaccatcgccattgaagactgcttcattcacaacaacacttcagtcattcaagacgaagtgctcgcacaacgactgggcctgatcccgctcaagggttctgtcgagggtatcaactggatgcactggtataagaaggcgtccgaagacggtaccgaggaggaagacggcccctgcgacttcaacaccattgtgctccgtctcgacgtggaatgctacaagaacgaatacgcagacaaggacgagcaggacccccgcaagctgtacaccaacgcccatgtttacgccaaggacctcatgtacatgcctgtcggtcgtcaggaacaattttttgtcggcgacggcgctatcgcacctgtcaacccagacattctgatcgccaagctccgtcccggccagaagatcgagatggaactccactgccaaaagggtattggtgccgatcacgccaagttctcgcctgtggctaccgcttcataccgtctcttgcctgaaattaagatcgagcgtccaatcattggcgaggatgcgaagaagttcgccaagtgcttccctaagggtgtgattggtattgagcccgtcacccctgaagaggccgcgcagcgtggaagtggatacgagggccatgccggcgagcagaaggctgtcgtgaaggatgcgtttaatgatactgtcagcagagagtgtctgcgccacgatgagttcaaggataaggtcaagctgggacgggtgcgtgatcacttcatcttcagcgtggagagcaccggtcaatttgagagtgacatgctcttcctggaggctgtaaaggttatgaagctgaagtgcaaccggtggaagaggggtctgaccgatttgatggcttgatcaatgggtcttttctctgttacaccttactatatgcattctttggcgttggatttttgggctgcctttgcgctgtacatttacgaaaagtcgatcagtgtttcgcctcacgaggtggagtctagatgtgttaattgtcttgaataaaagcccaacagctatcttttgaattctacacatttaactaaggctaatcatcccggtcataagctatctgattgtcgtaattctcacatgagaggcaggataagattggtcttatttaaaatgaagacgaaagcggaatgtggtagtgtaggctggatcgctgacagcgacttcttcgccatcctcgatcaaatcggccagcttttttcccaagtgaggtcgggtcatttcctccagctgaggtgggaagcgctgatagagggtcttctcttcagtacgcatactaggcttcttcaattgggcctcggctctttccccgagactgtcgatgaactcccccagggtcatgttggggtccacatccatcttccgggcaagttctccgcacacgggacagtcgggctttttctccgcctcgaaggtgtaggtgtacactccttcctcgccagcatacatcatgtagttggaaaggaatggattgcagccagtggcgatcttgagcacttctgaagttgtggaggccgcaatgacagcgtttgttgatgcgatagccggaatgatatttttgaccacaccctgggtcatctggaaggtaacaccatggatattgaaatgctgggcacgttcgtaagcggcattgtatatccacgatatgtgttccatgttgtcgctgtcaaaagtatcatctttgcgcttctcttgccatgcgatctggtgcgcccattcaatgcagtgttgaggctggcgcgggatggtggcaatagtgcagagaggaactgctggacgaggtgcgtgcatatccagttggcactcaatgcaagatgagatagagggtagaatgacacgggcttggcccttgaaacctggttgacacatcagtaacatgttcttggctaagcttgatgatataggtgggtaccttcagttccaccatcaacaagtggcttcagactcgtagggtcgtcttcatcgaccatagagatcaatgtggaattgatccagcgtcgagcttcgatactgtccaagccacagatgacaatattgaactgcatgtaatagtcttcatctttatcctggatcttgccgacgtagggcgtgatcttgactccttttactcgcttttgcacaaaagcagcggcaacttcggctttgggctttccgatatccgcctgacgaaacagaaattgccgattgagatttgatatatcaatggtgtctgtcgactgtgagcttctagtcttggtattctgagttgaaacacatacccatgtcgatgacatgaatatctttgaatcccgacagtgcgagattctttaagatctcgcatcctaggccaccagctccgctagatttcagtcagtccctcatcttgagaataccacaactttgcgaggttgacaaacatcaccctaagactcacgttagcgaaagtactatccccggagtgaatccacttacaaaattttggcagattccaaagcattaataggctcggggccagggttccagtcgtcatctgtaaaagggccacgtttactcaagacattgtagaggtgcttcctgtggggtattagcgcagatcgaaggtctcaagggtcattcaacgcaccatcgaccttgttgatccacgtagatcggagtttctggggcatctgaggttcccacatccacatccatcttgataggctcctgttatggacaactggtgagagtaaataggcgcagtatcaagtcgcgttacacagattaacgcttgttgaggtggatggcaggcagagtgagcctgatgagagtgatatcaggagcagatccagttcagcttttggtcggatcaccaaagtattcaagttactgataatgaagaggctgagttgacagcatcacttgcgcgtgggctgccttggggtgactatggctgactaatctcaggcccgcctattgtaatcctcaccaacctctctttttccccgaagtgtattcgaatcgataatggaaggccttctgacagcagtgaaaactgtcaagcgagattcagatgaccttgttacacctgctgtcgaatctcagcttgctgatccgccagtaagaaatgacttcgatcctgaacatctatcatcacgtcatatcatagatctacttaaaagcagtcctgatcgtgaacaactgtctgccattttggcagcccttgatcctttcagcaaatccaaaacttcaaaggacttcgacctccgaattgcaagtcccgtcacagcccagattcttcaattattagtcagcatcacgattccagatcattggggatccctagatgcaaaagacagcaaagggaaagacgccaaatctcgagcagcattattgagatgtcttagcagcgtcgcgggtctcggttccttggtggctcagctacgatctttgatcaacgcggcccgtgcttctgcccagcaagccaaaggttcaagcagccaacttgctatccgggatctattggctgtgcttgctgctttgctggagccaaaggactttttagcccgtctttcttctgatatttcagtcatttacgacagcaaaactcgacagcaagtcacctggagagagcttgtatccctcgttgctgccggcaaggttttatcgacagcagccgaggctcttactgttgttgacgagtcaagatcagtatcttcaatctcctgggttggaaatggttcccagtatgcatcatggcttgggcgcaatatttcttatatggtggcacgactagccccagataatgaaagcgactgggcctcagttgctttgttgacagggcgagccttaagccttggatatacaggtgaatataaaatgatggccttatttgaatcccaggctgacgttgtgcagatcagattgtcaaagaaatctactcggatctacttgttcggcagtccttgctggcgcactttggaatattattagaccatctcagacggacggagcagcttgcagttttagaagcgatcttccgtgatgtacaacgaaggtacttttcagatgatctattgggaacagtgggtcagtcaatcactacttcagaacccattaaaggagtggcagctttgatctccgccgtcatctcttcccagccagatttggaaagtcaagttgtggattggctctcaaaatcgcaaggtggctcaataaacacgttgggattacgtcgtgcactattagctacttgcagcaagaacgatagtaagttcacgttgtcgaaggaaacgacaacggaactaaccgcaacagatgtgttgaaggcactgctcatacgcagccttgagcaatttggagacaagttttctatcaaacatgtcccaaatatggtccagaatggtttgtcaacagcccacagtcctctgctcctaaaatattagcctctgacattgaatagcaactgcacaagtgattcttcttgccgctggccacctctatcggctagatcaagcgcaagtgaaagaagtaggccggtcaggagcatatctcaacgcagtctccaatcgactcgccgcgtcctctaacagggcacgatttcttggcatggtcgttggaacaggaatatctgaactcattgaggaaccagacaaagtgctgaaatttgacatagaggaaatgcggaacgaggaagccctttggtattcgcatttgacaaaggtccaagatgaggtcggttcgcctgaatctatcaaaggattgcaagaggtattgccagaaaaaccagaactagtccaccccaagccttcacaaaagccaaaggcacaattctcccgccagcatacaagcaagattgttgcgattgaagaagtcgatgacagtggtgaagaggaagaggaacaggaagatgacgacctcattccgtatgaaaagccagacgacgatgcatacgattctgatgacgatcctacgttggtccaacggaataagccgacagcgcctgtgtaagtacagatcgcctgctgatatggatctcgctaacaaatctaagatacatccgtgatttgatcccatatcttcgagacaacgaaaatgtcgagcgctatcatctcgccatcaccactgccccatccttaattcgacggaagataggattcggaactgaacttgctgagcagatcgaggagctagctctgactatcgtgggtctccaaaatgacaataatcatccgtcattccatgaatctcgcctacagagcatgattgcattgattgtgtccgagcccttaaaaatgggccgctggtttactgccatctacttcgatggagacctttctcaagtccagagatctgctgttcttacagctctgggtctgagtgctcgcgagttagccggtaatggagaggatgatgccaaggcactgcatctcccaactactggcgatacctcattcccatccaagcggctctcgcctgccctagaggcgatgtactcaggagcaaatgagtctcctattgcaatgctcacccgggaaacggcccgcacatccttggaaccgctcgcagccaacgcagcagatacaatgactggccccaatgctctcaaagtgcgcactttctcatctcgtatggaagtcgagaagaaacgccagcagcgtgacaccaagcgccaaaatgctacaatcaaggatctgcacaaggttcttgccgagggtttcttcttcccactgcagggcagatttgaaataatgatgctgcagtcttcgtcgtacgttttacgtccactctcaaaatcatattattaacatcgctccaggtcctccacaccctcatacaacccattcttcatcccccatctccttacactcttcctccaaaccctctccctcattctctctacaacaggtcctcacaccccctttctcccaggcctcacccatgaaactctctccctcctcttatctctacacacatcctcggcatccagcgaaccaaccgtcactgccgcactcctgtcacttttcctcgctgtggtggatctcaatattgcgtctggctcaaatggcgagcagcgtcttgtcaccgaatacgccacccaggtgatcgagctgcgagagtgggcttcccaggtcttcgaccggacgccgccttcggctgcgcgggctgatcctagctcagccgttaccgacccacaggagcagatacgcacccttgctgctggtgttatggtgcggcttggggaggtgatagagcggtatcagggtcggctgatgggtgttcattctggttttaactattaggcagatgacggaactatgtgaacattattgaaaatcccacgaacgagtacagccatcaacgcgccttggtcttttacatttcaaggaagaatgtaaatcgtgttgttccctttcttccgaaaatgacatacatatgtagctatcattatgatcgctgaggcgtagattggcccatttactccgccttgacaaagctacccttctcgatggccgcctccatcatccgatcaccactaatgatgctcgtggtacatataataatcttcctccgtggagcctcttgcgcagcaatgaagcgcaacgcggcgatctcggtgaacgtgataccacccaggaaaaagacatacacggtcttcgtagctgagttaccgctgagcgtttgacgagcccgcacagccttatcatcacccttctgcacgatactgaaagtcgcaccgcgagcactcttgacaacgtcctcgaagccaagccagccaggcgacgttgtattaggggtgttcgaggcggccggcgtacctcccttgatcaaggataccatataggatttttgtagcacacattgaaccaggcggacgctgaggggcgcaaagccactgtacacataagaaatgtcgttcggatccttttcgctgacctcctcgatgacaagacggaggtttttgcgcaggtacccgtagttcgtctttgatcctgcttgtgcaccggatgtagggagcagcattgtcgttgctgaggatctaggctggagaagttccattttctctagcgcccagaatgtgagaaggtgctggtggccgtacgcttgaaggacctgtctcttgaaactttctaggtcgcgggggcggagacccccagacatgcaggactccaggcacaggagccgtagcacagtcttaagtggaacatctcgagctatcagctcttcgattgtctcgtgctggtatgtggagtcggcaccggctgcattgttttgctggacttctaaagttttgcggaaggtttcggagcgggttagtcgcattatctcttctgcgaggttggtatgggttcgaagactctggtgctccagctggtacgttggtaatcggttgacaaactctcgaagctcgcctgtcgttttagccgtgtggcggctctcgtattcattttctaagcggcgagccaccttattcaggatatcgcccacgattgcaaagtttgcatctcgcagttggctgaacaactgatccgaggaatccagctgtatctttcttttcagcccctgcttgacttgctggggtgccttggatgactcggactgtggtgtgggagcaggaccgacaatgcttgtatcaacgtctgcctggttgttcttaataccgacatattcatcaattaagccttcataggtgagctgtgtgagaaggggtgtcccgaagtcgacgtcacggtctatgatgatcaagttctctacgctcgcacttggcaacaggcctcgtgcagagggatcagtcaatccggagctgtcctctgcatcaagttctttcctcatacgcaatagaagatctgctaagcgccgggcattgtccccttttccaacaatgcgtgggaaatagccatggcgctgctggacacccatgagagccttagcagaatggaagatacaccctggatctttgtgctgaataggatggtcagaaaatctctcaaatgttagcaacctatgaacttaccaagtacaagtcttcaaacgactcatccagttctaatgacaagatgtcttgttctagaggcataaaataaagaggaagctcggcgatgttcacgtcgccgatgattcctgcctcctccaagacagaattgctcataagcgtccgtcttggagcgaagaagatggaaaactcatgttcaacatttccattattctgcaagcgtttgatttgttctaagagaaatgtcagctcatcctgatggcactcaatcagagatagcaggaaagggccctaatgaaacaagcttggaaatgttgtaaaatagatatcgatatagggaacatttctccagattacatagagtagaaaagcctctgtataatctgatgatggcccatcatgggcccaaatgaaagagatccaatctgacaagccgacaggggggcaaaagagacaatgtcatacctgccacaattcgaacgtggcgagctttctcgccacgaacaaggaatacaacattgcgttgtgatgagtcgatgtttgcattttccagcaagaagacccggtcgacaccatactcttggagcacggagaacttgacgaatagacccactgggccggccagttcctggcttatcacgaggttcttcttaccccgggcctggagaatagttagcgcatataattgcttcgcttcgctccgcaatcagaatagaagatcaaggaggctgtgctcacgccttcgagtaaagtcaagagatccctccgcgccttgtccctaaaatagtccgcatccgaccccgataaaggagccatttcatccaggcagaggcaatgtcgtgagccaaaaataaacagagacgttgaagtgccactgcgcccgcattgggctagcactgccactgctgatgtaacatgtaactttggtattagtatcgttatcactgcgccatccaccatataactgggtggtaaatttggtacgccccttgtatacatattaccatcaggcggcgttctcgaacatctaactagctcccctgaaggcgtctcatattaattctttcttttgtctcacttcattctctttctccttactttcttgtactcccatttaccctcgatcattttaatcttattcaacaaatctttacagcactatacccccacccacgccatgggtcttttcaagaaatccgatggcgacgatgactccagccgccgagcactctttggctcgcggaagaaggacaagagccccccgaccccctccaacccttacgctcaaccaattccggtagacccatacactaaggccaagattggcgtgggtgttgcccccttacctgccgaccaccccgccgccaacggcggcccccactccatcccccccgacaacaagtacgccgccaacaagtacggaaaccaaggcggctacggcagtgatcgatttggcggacccggcgcaggcgccggaccctcaaccggaggctcgcgatacggaagcggtggttacggaggtctgggtagcagcgatcccaatgaccccgcggctgcagactccgctcgcaacgagcttttcggcggcgccaacagaaaccgggcaccggacaacgcgggcggcccatcaccacccccgtactccgagggtcagaatggtcagaacggtccaggaccgaactacggtggcggcagcaatgagtacagcatggcgaccttccaggatcgacagctgacagctgaagaagaggaggaggaagaggtccaggcgacgaagaacgagatacgcttcgtgaagcagggtgatgtagcatcaacacggaatgcactccgagctgccgcacaggctgaagaaaccggtcgcgccactctcgcccgacttggtgcgcagggcgagtccgtccacgacacagaaaagagtctggacatgacggccatcgaaggtcgcatcgcggaggacaaggcaaaggagcttaagacgctcaacaagagcatgttcgccgtacacgtggcgaacccattcacggcctcgcgacgccggcgcgagcgcgatgagaagatcctcaatacacaccgtgaggatcgtgatgtccgcgacggaacacggtccgaggcgcacgcgagtaatcagcgcatggaccggctgttccgtgatatcgagcgcgatgccgcgaaacagggcaagggcaagaaggcgagtgtcaccgagcgtgccaagtaccaattcgaggcggatagcgaggatgaggcaatggaggacgagattgaacagaacttggatctgctcagtggtgctaccggtcggttgaacggtcttgccaaggccactggcaaggagctggatgagcagaacagacatctggagcgtatcatgggcaaggtgagttttccctctaatcaggtgtgggtatgaagatgagactaactggctatagagcgactttgtcgacgatcagattgccatgaaccgggccaagctggaccggattcgttagtcacgttggttgttcaagacaaaagggctgcgatatgcctggtgctgtcgagctcagtaattttctgcgtacgttctgtccgttgggcatggatcacaaattggcgttaagctggttctgcattatctgccgtggtcatatcagacccggcgactagaatattagttgaacattaaataacataatttcattgattcattctgtacacttgaattgactatggcatagggaagtagccggaccgtgcgctctgtgacgcctttggtatgcaatatgagttggatatatcgtccaatactgccttaaagccttgagaaaccggagaagtcctgatattcagctcctcaaacctcaatcgcaaatccacgaagatcgacatcccaactgcgggggagcgcggggagtacccggagaatgaacctccaccgagccctaaatgtaacgaagtataaaaccgcactcccaccaaaaagcaacattaaccaacaaaccactacatctacaaactacattaaatccagcctacacccccccaccaaacccccatgcctctcccccaaaaaaccgacatcctcataataggcagcggcaacgccggcctcagcgccgcgctctcagccgcgcaaaccaacccaaccctccacataaccgtaatcgacaaaagccccctcacctgggcaggcggcaacacctacttcacagccggcgccttccgcacaacccacaacggcctcccggacctcctcccactagtcaacaacacggacgcaacccaagcatcccgcatcgacataccagtctacacagaacaagacttcaccgccgacctgcaacgcatgaccggcaaccgcaccgaccccgcactatcagcagcgctggtatccgactcgcgcgccgccgtcggctggctagccgccaacggcatccgcttccagctctccttcaaccgccaggcgtatgaagtcaacggccgggtcaagttctggggcggactcgcgctgaaaacacaagatggcgggaagggtttggtagaagatgagctgcgcgcggtcaggaacgccggcgtgggtgtgttcttcgataccgcggccacggggctggtgacggacccgacgagcggtgctgttatcggcgtggaagttgtccacactgacagagctggtgctggcgctgacacacacaggaacaagaacaggagaaccaccatcgctgccgacgcggtgattctcgcagcaggtgggttcgaggctagtccgcagctgcgtgcgcagtggctcgggcccggatgggacggcgcgcgcgtgcgcggcacaccatacaacacaggcgagatgttacaaatagcgcagcgcgatgcgtcagctaaaacagccgggaactggagtggatgtcatagcgtggcgtgggacgcggacgcgccgacggagtcgggcagtagggaggtttcgaacgagtatacgaagagcgggtatccgcttgggattatggtgaatcgggatgggaggcggtttgtggatgaggggtttgatatgcggaactatacgtatgcgatgattgggcggcgggtgttggagcagccaggacaggttgcgtttcaggtttgggatgcgcggacggtggcgtggttgcgggaggaggagtatcggggtgaggtggtgaggcggattgagggggcttcgttggaggagcttgcgaggaagtgtgtggatgttgggcttttggatcctgggcggtttgtgcagtgtgtcaaggagtataatgcttctgttgagggggtgggtgggcagaggaggtgggatccttctgctaaggatgggcttgctactaaggggctggctgttcctaagtcgaattgggctttgccgattgacaagccgcctttcctggctgtcaaggtcacggcgggtatcacgttcacttttgggggttggctgtgaatcctgagaccgcggcggtcacttcggagacgacgggtgatgaggttcctgggttgtattgtgtgggtgagatgcttgggggtatcttctacgataattaccctggtggaagtggattgacttctgggactgtgtttgggcgtcgtgctggtcgagcagcggcggagcgagctgggaagagaagactagaacggctgtgatgccttcgaagatcaagggtttacatatcagcatataactaatgactacaagtccaattaatgttcagaatgtcttctattgattagaatatatgtagtagcgacagtaattgactcgaccaaggccaggcccagccagtatcaaaacaataggaacatgttcttcctatgggtatcatcaccaacaaacctaaaattggaaacccatgcactggaaaggcgatcgaggaaagaaaaaacaatgtaatagctttaagccatgcagaaagcaggcaatggaagattaagaagcgaaaacaagtcagggtatggcctgcagagaataaaaacatcgaatcatcacaagccccatggtatcgagaaaaaagcacaaaggtgacgcccagtctagggaaagaataagaaatcaaatcaaaacaacgcatccagccggaaacctctatggtcataacgtgggtgaaacaaaggaaacatggaaatatgaaagaaaaaaaagaagctctctcttgcctgtcgccctcgaacggaacccattatacccataaatcacagaccgttttggaagggtatggtatgtataagcgtttctctctccgggaaatgtttgtcggaggtgaaatagaaaaagggatgaaaaggtgatccatgctgttgtacaaggagacgagaaagccggaaccgtttggatagacatgccaacacagttggtgcatgctcagacggagaacgagtttgtgaagggtggagattcgctttaggcgcgagggcgtaggagagggagcactcgacagcttccgtggaagatgtagtcgtatgaaagattggcagattactcgtcgtcatcgccagagccgggatccttctcgcccttgtggaccttcttgtgacggcgcaggtttgagacaacggagaagtgccgcccgcagccttcaacatcacacgcgaatgctggaaaatgtcagtatgattcgaatgatttagttctcacggaacaataaaaaaactcacgcttttcgccagtgtggctgtacatatgcgtctggagcgaagatggacgcgtgaaccgcttgtcgcagaccttgcacttgtgctttttctgggtgttggagggcatcttggagctgaactggctcatcatcgattgcgggccagggggagcactaccggccaaaaggctagtgggccggggaagagtgcgcgattcgtatgactcggaagttgtggagctgtagtcggtcacggaggagtcgacggagcccaccgaggcgctgtagtaggggtagttgccgccggaggagatagacgaggcggaggattgggtggaagggaaaccgtatgaatcggccgagcctcgcgtgccgcgaggaccggggccgtagatgttgcgcggagtcagatcctggctgagagcgaccattccgcggctggcgtcgagggcatcaccgaacgtaggggcggaagctgaagcgccaacgcgagcggcgtctctgtggattgtgtaagtctttgcgattccatgtaatgcagactcgaatcaacttacgagtgcgagatacggcggccgtcttgcgcggatgggtgaataggggcgtgggcgtaggcatagctggaaggtgcaaagctgctcattgggggagcgctggtgtaggaaggagcctggtcgaaagttgtgcgcgcaacctcgtgttgcattcccattacctcgggcccataggcggcgctcgcgtagctggacccggtcaccattgacggggcagacacggggatgttgggatagggcatggacatggcggagcggttcacttcctcctgcttgacctggcccagccccatgctggcgccattgcccatggaggtcgcatagactgggggcgtcgaatgcgacgaactgtgtgcccacgggtctgtaaactgtggtggggtgtgatgatagacattgtcgaagctcatgccgccatagggacggttctgattttccataaccatcgtcatagggaatagagtcgcgaatcgatcgcgtgtagaactgtatagagagattgaagatcgagtccaaaaagtaatggaatagagtgatcgtctgtgttgatccggaggtatatgaagacaaagtgataaacccgatgatcaacaattattttatatttttaagggagaaagaaaaagcagaaacagtctggggaaggggatcggcgaagcttatgaaggaatataaggcatgatcccatactccaaagtgccactgacgacgtcccgtcgggggtcgcagatcgctggaaatgataataccggtatttattattttattatttttattttattcgaataatgtttttattgtttaaattgtttataattgtttataatttgagtttttcccattttaaggattttcatgactacaaattcgggatttcttttattttcccctctcgggattggtggacagacctggattagggcacaagtggtccgcaccagttcctcggggggacaattcctctggatattgaccctaagcatactagccctcctatttacgctttgtcaatcagggtctaaaatatattaattgcttaatcaactaggctgaggaatggaagatctaaagaatcggccatcaatgttgacctgggaatgtcccagatgactccggcatcggaacggccatcctacaggaaaataagcataaccagaaatattccctaagcttataatacgaaaaaggagaaaatcatgagacgcaaaaagcagtcggtgacctcagaatcaaagggggtgtagactaggggaatgttcaattggagactagccgtgatgaaggctgtgagtggtcgaactgtgccgtgtctgagagacaaaagcggaaggaaatatattttattgtgtaaaaacaaaacaaaagggactgccaagaaataaactcaccaaggttcgccctgagtccgctgtttcaatgtagcggggcagatcccagtgtcaaagggtatacccgttgccgtgggggttaatatgagtgatatagtgatagttcttgcggaatacctctattcgtggctatcaccgttagttcgagtagcttttatccaaactttgatttcagagacatggcttgagaccaaccactatcgtagaatagagtctccattattggcaagctgcaggatcagaggcacatgttctgattctttggaaataaaaagataaaacggaatggcttaagccatggagggggcctatgacacggcacagagagggtttagcgccaacccgaccttacatagagagaaggcagtatcgaatcactagccgccagcattattgactgtattctaattccatcgagtcagggaatccggcaaaaatgcgatgacgttggactaactcgagctcctgtttcagaagtcaactagttagagtagtcttggttttagttttcgttttagtttgagtatatctagatatatactgtaatccgatggcgcacacgggacagtctacggctacggagtacctcagagcaagtcccaaaacacaacattcatcacaccgtttagtttagtcctcgcagaaaccaccgcatatagatacagatacgaccgtgcaatgagctcgcccagcggtacaccaaaaaaaaaaagcctcctgcaggtagaaggcataagttccaataccaacgctgccattagccgggccatgcgagctgtatcacatagagcccgtcctgaagtccacgcctaaggcacccgggccaacagaaaaccccataacaacctcgtattgggccttgataatcaagagagccacgggctgcaagccatgttttccttttctcctgtattaggactggggcagcgacgtcagaggggcggaacagcgcaacccagtgggaaaacgggtaaacggccgctttggtcatagttggtgggcgccgctcccgcaataggtcgacatatcacaattatcacaatctattgacctttttttttttccccttgtggatttggaaatggaaatggtcatggtcatggcctcgtgcagtggaaccaacagattctcctctttctctccgaccaaattttcctattcaatagtgtgtgccaatacgcaataaataaatttccgatatgggtggtctatggtccccgaggctcggggtttgatgtcacccatagaaagttcaaagaagacatggttgatcactcaaggtacaaggtacaaggtacgaggggggaaacagatcgtcgaccaagagccgaggaagaggctgaagaaaaggcgacataccctagtcctcctccaatcacatagtcctatatccgtctccatcccatgattggcgtttagcccgggggggaggaagccatctagcgtaagaccgaagtacgacgtacatatattggacatcccgtactccgtaaaccacacacattcgaggattgattcaggatcaactgccgctctcccggacgagaggacaaaaacatgttcaaccgtgggctcggcacaacggagatctaaccgggaagcttaggagcagggagccaacacaaagcgaaaaaaggaaaagaataagcgcagttccaacttttcctctctcccagcttctccgcattccagtttccaaccatggcgacgccacgtcctttgccttttcgaaaaacttggagtccctacagaaaccatggaaaccggcaattaaacaacctgtgggccgtgggcaactatccggagttcggtcctcatccgttcacctctgctcagatgcagtatgggggtatccatggatatcgcggatgtgtgcctcgaaggcgaccgtgggtcccgggttactggattaagattggagtcgcgattagctttctaggtatgttgtatcagactacagtttatccccagcactttagcctttggatgcgaataaacatctctccagtctcgccatccttactccgtagtcccgtgtctaggcggtcggggtggacatccccccaaaagagaaaaaaaaaagaaaaaaaagagcgcaattgggcagtcagtcgggtacccaactgccatgtccacattgcaccaagttgaaagcgaaaagtgaaagggggcaaaaaataatacataggttcaggttacttcagcttcaaattgccccattctgaaaaaaaaaagcccagatatggagcccttgaaattaaaagaggcgcgcacttctcggtctcggtcagccaacccaacacaacgcaaaaaaaaagaaaaaacaagcaatgcaacaagatgggctggaggctgggcgtgactcccccttttgtgcatgccgtgtttggtggaccgaacaatctcaccggcagaactccgtctttctctcaacgaacgcccactgtgctggcaaaatgtggcgtttttgagatgctcatttttgaggtcgagagtgggtgggggaagggcccggaggggatgtgagaattagaacgtgtgggcgccaagagatggttttgtgttttggggtggatatagcttggttcgtcccgtatctgtatacgccgtacattggcaatggcgtccagtagttcaactttttgaggaaggtatacctgggccataatattgggccggggtgtgccggcagagctggagaatggggtcggctggtactccatacagacctgcagctctcggagttctataggtttgcactttgtacaggtccaccgctgcagaagggcccctagactagacagacacaggggtggagcatatctaaggtcgtgaacgttggaaacctgtgtgagaggacctgcttcaaggtcttctcgcgatgggccgtcaaggggggaagccttgacggccttgacggccctgaccgctccgacacggctcatattaatgacgcgtcttctgggaccctgagaagtttttttttttctgtcgtgctttcacggttttatctgcttttccgagaaacccgctggaaaattcagaaaagggaaaagggcggtcagagattgagatgtgacagttcaacacaggcagatcggagaaatagcgatatcaacccctggatttcgatctcagttgcccatgtcgagccgcttattacctcctcaaggacggagtacgctgtaatcagatccttatctcgcacgttgacgatccgcctcaatgccgagtgtcaatcaggtacccttggccaacaaaggcctgtcatctgcatggggctccgatcttggcagttcccacacggcagatcgtcatgtccctaattcaaggttgactgatcatcgtctcttttgggtggatatgtttctagtagtgctagtaatgagttaaaactcgataatgaggtaaaattggatagcgagtgaaaattcgaggtaatgagtgatccgatagtatgttcgctagtatattgtatttccccgtcacgctcccaatttctatacatagaactgaaacggtgaaccattcatgtccaaagcgttacatccagtggatctgtggatggcgacagacaatccgggtcaatgggacaacccatatggcatccacagcttagcatccacagctaggcagtccctttaaaaaaaaaaacaaaacttattgaactcggccgcccctgattggacgacacccggtatcccgataccggacccctttaggtttctttccacagtttcacactaatccggattagctcggcccagttgggcctagtgtggcttaattgcatggggtccacattcttacatgtttgctgcagagcctgccagccaatccgcagcgtccattggcaatccaggcccacctgaaaacggcagatagtcgatagccgatcttggcagtcgttgatcgaccaattggatcttcagccccaccaggagctgacgcgtgctcatcccgcgcttttaagccaacgtggttatcgactccttggtataggtcgaacaaagtaggaaggttaaccttggattgcgagacttggaatactcgggtttttttttgcaaccgtgatgagtatctttttgctggcttttctttggatgattctacatcgtaccccatagtcctactgacacaaacccaaagtcaaatgaccctcccccagcaccctccccgcaaagcccgttttggctttcgtccccaaactcgagatccctgcgtgcgatcctggttagactccacatttcccgctaggaacactgccactttcagggtcaacgctaaacaacctgaaacgcgagtggggggattcccatacgtacagtgactccgtaatttatattttatattgtcattcctttccctcctgttcgagagagagatcccaatataaactattcttgcattatcctccgtgatctaagccgcaccgagtaatttgtccctgccactagtctggaccagtacttattctgcgattccttatccattacgtagtggggctggtcgagagaatcggaacatggccggagaacctcggacatggcttgcgactggacggtctttagcgttgtcagcgtgagaccaagtgcgcctctttagcctgaagaaacggacttttgccttaataggcgattaactcgactgtttgatcggacctccccgccaccgaagaagaaactttgggccaagtcccatctctgcggttcttgttggagttccccgagaattgacggtggatattggagaaactgcggtgtgcgctgtagcctttccccattcctggactgttgtatcttatggtacaaatcaagcttgctgtctactccgtactcacatacaaccctacatcagatgcatgaagacaagaagtggggaaatcctctctcttggcctatgtcaccagacatcctaaacactgcaggaataccaagacctgagggaggggccgtagtcttagcataaatcttagtgtaccatagccatagcccgtggcccaaaaaaaaggtaatgccgatccaccaagtgtgtgtatccctagctgtgtgcctcaaccgccgtgatggggcgctgcagggtctccgatcccttgcaagattcagaatgttatagtatagtatagtcatctaattctcacagaacaatcatgtcttagctatgatttacgtagcttgctttttggtttattgtcctagaacagaacaataacaacgttccagcattgttaaaagcttccaatcatccgttgcgcaagtattctcctaatcgaaatgatctactacgttacgcaagtcaatcccgcagatcaacataaccttttttttccttagttatctttcctagtgtactccgtagactccgttctctttcacatgaatccaatctcggtatctcgcatgcttgacagctaaacatagttacttgcactttacatacagcgccggatctcgaggttggattgatgcgcgtaacaggccttccccacctctactatacactgcatgcccatatacatacgctttacgccttccaggtggggtcacctcgggattcattccctgcatgtgctactccgtacctccacgatctaaggatctatgaacctcaaaccgggacccatggtccttgcagctgtggtctctggttctgtgccgtgtccaccgcgctaaaagaggaactgatagcttacccggagatgctacggagtagttacggagtacggaagtactccatcgtgagtatgtaataagaataatcaataaactcacgtcctaaagcgggtagcagaccctggaaatctaaaaaaaagaggattccagaccttcccaggttggaacgtgtgcaaaccatggaaaagggtagaaaggggcgttacacaactgcccccttatcagggtctgtgtgttttctttttgacttcaccgttgtgtactccgtagggagtactacgagtacagtacggagtacatacagggaaatcaaatcccctccattccgcggtggttcagtgtgattggggatggaccctgaattcagggggaggctgtgtagtttgaagctacatactccagtgcttagttcgatatctgatatgttgtactctatacattcacattcgcggtagagaatgagtacgtactcgatttatattgaaggtatagtatacaacatacatatccacttacttccatagattattccagtctatactctatatccataatccatattagaataccacatgcctacatctgtactctgtatgtaacctcgatataaaaagaactaagcatgtacaaacgtaattctaaaatggagattccccacacgagccaagagcttacgcggccacttcctgcgccaagtcccttccacggcaagcttagagccattggcgattacatcgcctgcccctcctttttgattactttgtaactcctccggaccctgcgatgacgacttttctggttctggtttctattttttgtgtggcaaaatggggagagggaaaggggagggggttgcccccatattattctcttagctgaatggcttgctggatgttttgcgtaagtactaagaaatataggtttggacttactgtagttagttagttactcgtagactgtagtacttacgtcggataaatgacgtccttatactccgtaccccagactcagaccctgttgtttggagattagagatcttgttgacatcatcgtcggccttggagcgatccctgcctgatcggcccttgtcaccatgcttggctcgattattctacgtatgttatacaatctatagaaacgatcgactctacagaacggttgtttccgaattagagattaaagtcaattgaaattgtagttcgtatatcggactatgaaggagaaggccgttgaaccttggaatgatcgtacctagatagagatatatatcacctaccggaattacacgagagtaagcagccacaaagtatattttagatatctatcacaaacgcttggaatactatgcagtagtcagttccatttttgaattgatgtccacaaatggaatacagttacacttaggcacctcagcatgaagcaataggaaaggcctccgcttccatgcttgcaacataacttcgcttttacgagtatgtctgcattagggtgcagatatagtttaatagtttagtagataaggtaaaagaggttcccattaatattgcgaagacttaatattccattgcagtacatgagatctgatatccatcagaacgaaagaaaaacaccggctagcaaaaacgcacccataaaaatccgtatgaataatacatgagaaagcagaccatccatttacaacaccatccctagacaatgatggacagttccggtcgctccacgtcgccctccatgtccgggtagtaaggaaccatcgcatcggctgcctggacgtatgcatcgttgtagagtctccagtaaggcatgcggacctttcgagcagggtggaacaagccggcccaaacgtagttcataacgataccagtgccgaccgccatccggacggcttcgatggcttcgatgacccggtcgatgacgtggggactggtctcgaagatgttggggaatagcaggttcagcagatggaccatggcgtcctcgcaaccaagaccgatcacgccgagtgcgacgtgcttaaccgcgctggcagcggtctgtcggtggacttgatcacgatcgacaagggcatcttctagcagcggcgtgacagcgtagacataatccttgcccatctcgccgatgtactcgaacaagaaggacaaggacttgagcacaccgttttgcacgttgagatccggcacccggtactcgttcatcagcgccgggagcacagtgaacggggcacaagtttcggccacgataccgatagcgacagctgtgcagacacgcgactgacgctcttggactcgcaagttgccgagaagagcggccaggacatcctgaggaccaatggccttggcaatgaaaccgaatgtgttgttggccgcccggcggattcccttcttgtgagccttgagcatatccatcagctcaaagcagatgcgcatccattcgcgggcattcacggactcgggaccacggtcggcaatacgaccaacgagatcaattgtgttttcctgcaccttttcgtgacggttgcgcagaatgggggtaagtcggggaaggaggtcgcgaatgggtggctgcatctgggtgataccgaccacggtgacgatggcacgcaaagcacccaagatggagcccagaacctcggggtattcttcacccaggtattcgtagagcacgataccaagcttgcccatgagtgcttcctcgtcacactgcttcatcaccagcgcaacgcgcgagatcagatcggctgcctgttgtcgaacagtgggggacttgttgttcaggcgccagagaatagtactgacaatctgagggatatatgccttgcatcgcgtgccaagtgcatttaccaccgtgccaaatccattgagaataacaaggtcttcgatgctttgttcctggaaggcgaagaggacaccatcaatgaggcgttcttccagcctctcagagatgtcagcggctccaagcgatgcaatcaatttttcgaccgtttccacagtcatcttgcgatatggctcgctttcatccttcaggttgttgacgacgcgctcgagaatctcgccaacacccactttctggcccagatccactgtggtatcgaccacctggcggtagtttcgtcgatcgagtgccatacgtcgcatccagaagcccttgaagaactctgtcaagacgtgctccttcaagtagccggcagtcacacctggagtgtttgcacattgagaaaccaccttcaatacgaccttcttcatttcctcatctggcgaggcgaattctcgaataaggatctccatgatttgagtggtgtagtagttggcatactcttcatccataagaggaatgatgtagccgacagccttgaggaaggcagagagacccttgccacgctgcttgcgggcacccgtccaaagagggcttaagatgtcatcgaaactttcaataccatatgggttcgcagcctccgccaaagaggccagagatagagcggtgacggtccgaaccttagcttgttcatcactgaggttacctgaaacgcatccaaccagctccttgagatgagggagaatggcgcaacccatgagaatagggatgtgctggacaatcttgacaccggtgtgtcgagcctgccaggacttcttactgcgacagacagcgcggaggaaaggaaggagggcgggaatactgagggcagaggccacaacggcaaaagcgcgtgctgtcgtgtttcgcacatattcatcggcgtggtcaatatcaggacgcatagtactgatcattgtggccagaccggcggccttggcaaggtttgagataatctctcggccttcaacacgggcatagtagtcttgatcaatgagtaatggttcgatgacgaccaagatcttatgaacatagggacgaaccagatcatcaagcttgtagaggattcggtcaatgaccttcaccagcaaatgacgctcctggtcttccagagtcctttccatgagcagggggagaatttgattgaaaagagcaccgggaccaaagtcgcgtgcattgtctgtgatctgacgcagagcagtctttcgcatgggtggggtaccgttcttgatcttgagcagcaatctcatgatcttccgctccttcatttcttcgacagtcatgctggtctcatccccaccctccatcagcttaccgaagtaggccatgtcctccgccttgaagaattgaagttcacccacaccggggatatcagttggaagatcctttcctacagactgaacagtttctggctcttgcatcatgaaccctccgacaccagcgttagagattggtgctggcgtggctaagatcctgcgagactgggttcgaatgggttcatatccgggaggagggtcaaggaccttgtaaccttgggcctcaccgggaagcatgatatcgagctcttcgtcagaccagccaacaacttgaccgggcataccaaccccaaaaccgactgcaggtgtagcggcacctgcttgagatggatgcatgggagtagcgagcccttggttgccaacgggggtagcagctgtgagagatggcgctagatcccatctcgacggcatggattcgggttcctctttgggagcatcgaaacgcgatcttttctctggttcggtagaagaatcgccccatcggttctttcgctttttttcggtagccaccgcgacggtcgaacccgcctcggcgttctctttgtcctgttccacaagtttcaaggtagcctggtgttctgtgacgtcttcacccttctcgagcttctctgcgatcagctgtttcacgcgctcctcttccctctctacctcacggatggccatgacctcccggtatgtttgactttctccttcaacattcgcatgggcattggcagcaaagggatcggcgcgcgtcggggttagggcgccacggttgaatcggcgcttttggtagtctgtctcgcggtctgcgatccgcgccgccttttcgcggcctagcagaatgtcctcctcctcaacgccagttccttgcgccatctcatcaatctggcctctggtagcagtgtattggccaaccagtctgtgtcctccatccgcatcttccatttcttcatcaacatcaacggcgatcgaggtatcgtagcccgaaaacttctccgctccatcccgttcgtacaaaaaggtgtcgaacgattccgtcagggaggctttggttgagttatcggtgcgctgagcagactggtcaaaggtcttggagccctttttactagcagcagcagcattgcgctcggcttgaagccgtcgaacggcctcgatatcggctacaatgggatcagtatggggccaggctggggagcttgcgaaaacttaccgtcagacatggtgataagatgtaaaagtcgcgaggatatgagtgagcctgttttaccgcagaagggaacaccgcagctacatccggattgaaaaccgctgtaacggtcacaataatggtgattgaggatgctgtgttgctagccgcctcgtgatgaaaaaggtcgtgattgggttgcacgtgattcgacacctttgcttcttggattctaaggttgtctattggaatcacgtgcattgtaacgtaagcatgcctttgaaggcggtcaatgacgttggacatcgatgtgaaaggaatatgaaggaatatggcgaacatcctaacaggagggtatagcagcagcccaaagaggccaaaatgagaggggggatattgcttaagggaaatctcagcccctaaagcatttcacattgccatagcactaactcctttgagctaccactactaatatttgattagaagtcgttgatatttctacctagtagtgccattctgggctgttcactctataatgccttgtgtttgatcaattttaacacttttatgttctgagctgtaaatgtgttgctgcccgattgacactcaaaagttgtggcgctgcgagggcgcttacaattcatttatgtcctacaaccagtgtatcagggacattgaaggtctgcatggcctttgctgttcgtttgtacctgaaactaattgtctattttaggaaaaagcttcacatgatgggaataagaccaagaggctacccgatagccaatgacagatctaggctatagtagctgcttcaaataagcgcctgcaacactccaagcttccgtaatatcacttgattagccttccaaggctgacttatatagtagattggaaaattctaatcatacttaatctattctaaggttttccaacatcaaagcgactgtttgctgccggccggtaaacaacaacggtgctagtgtaactcttagagcgccgtggttacatccttttcattctaaccaacacatgaattaaaatctcatttctcatctctccagcaacctttcaagagaagtggcgttgacaacaaagaagccaatgctagcacagcacaccgttaccccggaattcagatggtatcctcagtcaacagactcggatactttcttagctgtatgcactatatagacaactcataggtgaatggtggtatccatttatatagaatctatcattggtcccctcgaaggcctattgaaccataatccactacgccttgaatgcggtttgccttgctacctgtgcggcaaatcttaaactccgagcatgtcctttgttatatatcagagtagccctgccaaatttttattaaataggatatctctccttgcatgttggtttatccttgcccttataccctggttcctattcacagccccagaactagatttgctcgagcaaattctaccatctttctacatcgtatagatccaaactactcgtccaccatgaaactcctcttagcgctgtcattgctccttgtagcggcaaatgtggaaggacattctggtcttcctcatcctctggctcttgcttcctcattctcccaaatctaccaccaacttgacaagatcaacctggggaattgctctctcacaaacgtatcactctcactgaacacgacaaagccaccgctcccagcaccatcaacgaacttgactctcaaatacattgcattgggcagaggaacacagaactatacctgcccatcgaatgcttccaccatcaatcccaaagctacaggggctgccgctacactcttcgatgcctcctgcattgcatcatcgtccttagctctcctccacgaagtccccgcaatcatcagcgccactcctcttgaatctgtcgcgttcatggcagcccttgtagcccagggcacgagaagtaacaatatcattattggccaacattacttcaacgctgatggagaacctgtctttgacatgggactgagtggctccaattcctggattgctggtggtaaattagcagctactccagcgccgaacgcaacgtcaggatcctccggtgatgttccgtggcttaagctaggatacaagaaggggaacggcattcaggtaagctcgggttgtccataatcggatttgaagtatacatatctgaccgatttatatataggaagtttaccgagttgtgacatcccagggtgatccaccatctacgtgcgctggtcaaaatagaacgatacaaattgcttatgccgcagaatattggttttacgggtgaatcgttctacatactttcgtgtttgaagctatacggtggacctttgggttttttacgacgatatatacgaccgcgagagcctttctaatatatgtatctagaactgtgtgaaaatacagttcatttgttggaatttcccgaaagacaagcttgccttgggaataaccgatttggccaattacattgatcactaggcaaaatagacatctcatactccgtgctgtggactctactgcttgatttctactatcatgtgcacgcaccaaatgttgtccaaagagaaatggttctcttaatgtcttaatgatcgtattgctaaagaataaaaaagtcctgaacgcccgcaagaaaaccaccattccacgattgagaccacaacgggccagcgccaggatgaatgcagacgcgaagaatcaagaagtacaatgtcaccaggcaacatgtaaagcccgtcgctcaaatctcgggggcggaaaagcattcatgcagaaaatgccgatgtaaacgtctctcccaccaacgcagaaccattcctatttcaaacacaccaaccagctccaacttggcagaagctgggaatttatacattgtcatcttcatagacaaagttgatgtcacggatgcgacggcggttggtggcaatgaactcttggtcaccggcgggtcgctcgttgcgagtgttagcggtaagcatgctctgaaggctcatgcaaacgctctcaacggtctgtactggggaccaaccggcggagcccaggaggtcaaggcagataatgccattgctgtagatatggggatgcattgggattgagcggggtgtaccagtggaggcagcacattggatgaattggacctccgggggttctaaaatgatcatgtgtcaaaactcggaatggtctgatcatctgaaagacgagacaaagacaagaggaatggaatagaccccgagaggaaggtacagacagaggctgctgagaagataaggcttaccaataggatacttgttactgaagacaaatttcaaccgataagtctgatccaggtatagtgggttctggtcaaggatcttgatgtccatctgccattcctccagattgtcgcacttgacgattgtaattcccggtgggacatgctcttgcatctataaggtcaaaggtcaggggaacacgtttataggatggtcaatatgcatgggcgctatggtatgctcccaaaatatgcggggagacaaaggcgataagaccaagaggaaaacggaggaaacggtaccttaatgagctcctatagttcatgaacagagtcagcaagatgtgcattccagcaccattcagattcagggtataatcaccttgctcagacgctttgtcgcgaacattgttgcgatatggtgctgaaagaaaaggtttagatgtttgagctccagtggagaaggaggggcggtgtctcgatttggtggagtagagcggatgtatgacgtcgaggacagaaaatgaagaacttcccaagtgagacgagaatgaactgaagaagcaaaggatatgatagagctaaaaagaagagatactgttaaaggatcacaagggacggtctaaaggcaggtggggagatcatctattgatccacgtgatattgacacctgactatattgggttcatagatgtctttcatacttggtagctctcattttgtcatagacatttcaagttgtatagttatacaacataagcattgagtttgacttcaggccagtttgaaacatcggaagagtgactagtctaaaatatcttaacagttcaatcacacatagttattacatagtcgggcagcaacgcaattacatatatcagaatacagtagcgcccgacatcgacttccatgtcggaagataatagtacaaactggcagggggtcaacgtctccgttttgcacctcggggttgcttctcatcatcgcagctgttccacgccacctcagagccggggggagccgagggggtcgatagcttccataaattaaagacggccttccttccttaactccttcacttttcctgccatggtgggatccttcttctttaagaactccacaaagctatccatcatatgagtcttcatagcatttagctccttccatggctgaatttgactcggcactgtcagccccgtatataccttcatcggatgttctcgcgcctgcagccagagattcgtaagtcccacagactgccgatttagcataggatagagctcgctccagactaggttacccatgatgcgcacctggcccgggtattccaagccttcatcctgggggtcttcactggcagtgccgtctgcactttcatttgtgacagtcttatcgaagtctggatcgacagccaggacaaagccttggaagtcccctttgagaagggttttgtcctttgtgatggaagcgtagaaatcgtcgttgatatatgagtttacgcccatgaaatcgatgagaaggaaaacagatggtgctattttattgttccactcttccgaggaccggatttgttggtagtgtctgtaagcagcattagtctcttgctcatttgaatcctgggatggaaagaataaggccatctaaccttcttgctgctgttactggatttgctgtgtcaaagcctagttccttgcagtcaaaccaatgcagtttgaggtgtggtttgatctcgtcagcgccctggacgtcatcaccccatgccgacaagtgagcttccaagtctcgctgtagggttgcccactgctcatcggagaacttgtccgctgtgcgatagattgctaatccgaacccatagttgtctctttcccatggttgcaagctcaagctcgcttcctgcgcccgaaggagttgctgaatccagggctgtacaggtggctgcggcgaaggcgccagtccgcgtatcttctcacgcagctcatcctgtaatactgtactaatagaaaggcgctcgcggcgggccgcgtcactctgcgtcgcacttggaccttgaacaatcgcagcctcgttctgagcctcgatacatttggtgactcggtctaccaggagcttggaaaacccgtagtttttgtcttggtgctctaggtcaggattgtgtagcccagcgatgatctcggagggcgcagtgtaaccgttgtacccatccatggacatccaaatattgaaatctgccattgaggtaacggcaatgaggtcggtccaccgctgcgcgagaattttcatttccgaggattctgttttttcagctgggatcgcaatcaagctgtccaatgtccgttcacgtaattcggcaacgcgggcgaggacccaggaatgggcggtactggtcatgacttcgtactgtgcgcgaatatattcttcccaaagagcagtaaggttgagctcgggagaaaagccgtcttgggccttgcgccgtgcattcaaggcgtcctgaatttctccgaaatcaccagatattttattgaaggtatcgcgcatattagtccggatctgaggattatttaggtactcaaagacggcaatgacggaggtcaggtattcatgggcgatcgtgaaatggtccgggttgttgagatctttttcgcgccaacgcgatgcggacacaggcgcaaggcctccccagaggcgggttttgacaaagtgaatattctgtccaatatagcacagtccgctcaagtcctccgggcccgtgatccgcatcatcgccttctgcacagttgggagagcggccttgttgaacggcgcaggcgcccactctgaactcggggtcatgaacagtgggaattcatctgaatcgattaaagctaaatcggtcttcttcccgttcggtagaataccatacgttatgaattccataaaattcaagacggcttgcggttcaatcaacgtgtccactgattttggttagcgaagtgacagtgacgcagtaacaagtgggaccataccaactactatgtcctggctcatccaatgtttctctgtaatggtcgatcctctgtaatcggcagcattggaaatggaagcgtttgggctggccgattcaccagaatctgtatgggaatatcgcgcgatattggcctgtgttacgcggcaggcccaaggcgcgaggttccgagcattgcgacgtgtcaccaagccagcacgggcactggtgttcgcaacgcgaggtgtcgtgcgggaagataacctagcgaaaacacggcgattaacctgaggcaggcttcgggaaagtctggtcgccatgatgcgttggatggatgtgatctgcagggtgcaggtaaatggcgatctgagcagataagcttgggctccaggggtaaaatcctcttttttcagccgcaacggaaatactaggtatagaagactgaatttggtgctaaatttttatgtctagtatactaaggatctgaaagtggttttatctagaaagtaaataccaccgtcgagcggttattttggatcaggatacctacatagcattgaagatcatgtgattagggtttgaatgagcatctgtatcgccataggatttgcattcagttcctttacaaaaccatcatacattggaaattcacgtagctgagcaatttggttcgggaaaaatgctcacaatagttgtctctagtgggcagatagtgaccaaggtctccgcattgagagagtgcattcgaactaaattattaagtacagagagggaataggaaaagaaagagagatcgaggatcaagaccgtgggttttgcaatgcgctcgcttgcacacttgggaaggagcatctcgcaagggaggaactaacgaccactcagaccgtaacacgggacatcatcttaaaagccttccaaacgattctgcttgataatatcctcaatatgcaaatcacgtagacgaaactcaactcccgcagccgaacataacaacccaagttccacattgaagttcgcaaagtggtccaacaaggcaggtataggacggggtttggtgttagactcctcagttgactgcatgacatgcatccagtctcccttgacctctaaataagtcaggtttgggcagcggcctcccgagagaaggtctttgaccgcctcaactagttcaggtatatgctgtgcctctagagcatcaaggataatgctttccagcgatagaggcaaaagatcactgaatctattccttactgtctcgttccggccactccaacctcggtcccagtctactatatgacatatctgtagccgaagttgcttcagcgcgctgaatcccgcgaatgatccgatgtattcatagccgtaagtcccataattggaataattgttggtgtacgcgtcggtcaatgttaacgtttgcaaggtctcccgatgtctttgtaatggtgggtagtaattcgccgcgtacatcccctcatcttctaggaaaggcgggatatcggcatgctcaaagataaaagattcgaggctcttggctgcgccgatgaaacttgcaaagcctcttcgagaacaactggacttgaggtggatatgagtgacattggagtaccgagcattatcagacccgtagctagccgtattgaacgcttgatcttcgacatctttctcgccatcaaatatcatatccccacaaaagcttcgtaacgagggaagtcgaaggattgggagaaagtgcgatgagctgaggccaccatctgtatcagaacatacgacagtgaggtgtcttaatttagataagccagagccttctttttcggcgattctagccatccactcgagagtgtagtttgaatattcatgaacctgtacaaccagatcctccagattaggcaagagggccagaagcaggacagtccacgcgtcatgactcccttgagtctgtagttcctggtcccatgtggataggctatcgtcaggccctaggattgatttcagaactggtaggataacctcctgttcatatcgcatgacggaaggccgcagccactcatgggagacacggagagtgcgcacttcttgcgctaatgtcggattaaatgcgagtgtgtgcgccagatgactcaagcggccatagtggtgctctatcaggtcgagcgatgtaaagactttgggtaacaaaagtggatagaaggcacggcaacaggaggcgagccgtaaaatatccgtgtggctatcaagatggcttgttattaagagcagcagctctgctggtaacgtagagagcatgtttctttacagcatagtaacggaaaatcgtgaatgcgagtgtatggtcaaattgtatggcaataaaaaataaacaacccgaaaatgacaatttgatgggacacaattaataagcaaatgcataggctaggcaacggtcacatgagcggtctgtaaaaagacatgtaaacaaatggtaacaatttggtttcgacataactagtgaacatgatagcgagtgaaaatctttgataacccaatttagagcaccttgagggttcagtacaagtgccttgaacgttgagtcggaaaaaaagatccaagtgcttgctacccttcgtggttgtatagtttaccaaaacaagaaattcaagcgcgatgattggttgggaatcacagaattatatccaagaaaccgcctggcagataaaagatagatacagggcaggataggcatagaaacagcgtatggacaagacgtaagatgtgaaagagacacaaagaaagatagtaaacaatttacgcagcagcagccttctcgcgagcttcgcgttcgatcttctcccgctcctcggcctccttctgctcccggaccttggccagaacaacttcacggaaaatagcaccacgggcagcacttcccagactcttcttcttggcgtggccgggggcaggagcggcatcgccgcttggcactgatggttccaccacacttgactcttcgactgagttgcccatgtccatggggctggggatgtcctccccatccccatcttcgtcctcgtgcatcttgagcgactcgatacggttggcgagcttgacgatctcgattccgcggcggagacgggcgcgcgcaatgtaggtgcggatttctggcagcaagtcgcggtcgctcgcagtctctccggtcagccatacgtgcttgagggcttcctcggaggtgacccgcttgctggggtccacattcaggagagagagaatgaaatctttggcgtcctgggagacatcgcgccagtaccgctcgtggaagatgatgcggcctgtccggcattcttcgatgaggtcggtcaaggtctcggatcggaagggggagtagccacacaggagggtgtaggtgatgacgccgagcgaccacatatcgacagccttgccgtggccctgcttgagcatgacttcgggagcagcatatccaaaggagccggccatgctggtcaatacctcagaggggctgtgcagcatcttcgcgataccgaaatctgccaagaccaattgagagtcgggggcacgggtgaggtagaggaggttctcgggtttcaagtcttcgcaaggattagtatatacaaagcgctaacgtgggttagggactgacctcggtgaacaatgttgcgcttgtgtagatagtccacggcatcaagcacctggcggatggtctgcgacgcatccttctcagtgaacttgccatactcgcagattcggtcgaacagctcgccaccagtggctagctgtgtaacgatatagaatttgtcctaggcccactattagagctccgcaacgatcggatttaacagagacgcgctcaccttagattcgaaccagtcgacgaaagagacaatgtggggatgtttgagcgactgcaacatctcgagctcatcgtggaccatgccctcgttgccacggacatttttcttcagaatgatcttgaccgcaaccttctgtccgtcggggccatctgcctcgcgaacaattccgtatgtacctgcgcccattgtccgtccgaatttatagagagccctatagccagcggaaaacaggtcagcgattgtggggtaatgggggtatgataaggagcctgtacttcttttcgtagctctccggctgcccggacagcttattgagcatgtttgcgactaggagagcgagcgttagtgaactgtggggcgtctcagacgaattgcacaaaataaatgacagaaaagacccctggaggagccgaccgagcggggagggcttagacatggcgaagcagaccctgatacaaaatgatagctagaagcccaagtcctcccagttcccatatattccacggggggctcacaagaagcgtgtagatcgccatggtatccaacgcagtgcagtcagattatagacaaggctgcagcgggagaatatttggccaaccccagacgacgaatcatagcaagaacggggaacagaagtcccacgaatatgggaatatcgactcacaactcatgatgtggggatagggctgcagacgcctaatgtagcagacgcggtgtgcagttggctcgaatggacacggaacgcgttaggtagcaacgactggaacgaagaagaggtctgaggatccaataattgaggctttttaaggaatggcccgatctaagagagaatagggtcagtgatatagaaaatatagaaataaattcgaggggtgagcgcgggggtggctgcgtgaaacaccaaacaggaacagagtaaacataccacactaggcagactgaaagatccgagatcgtagattcaattgccagtgagcccaaggagatgaatttaaaaaaagattccaaacaaaaaaagtgctggagaggggaagatcaggaagttctagacgcgataaggcttgcgggcttgggggctgtagggtttagcgccagcacagccacaacggggaatgttactgcctccagggctgacgagacgaattaatatcgacatgatgggaaattaggaaatactgagtaggggaaagattgaagacgatcaagatgatcatggaaacgaaagtacgatgtacattcttggagatgtcactatttacgtactccgtactatcgcgagaacccatggtcatatcaatcccctaaatagaatgcaagacccgggtatctatttagagtcacaccattcgaaacaccatccgagacagacaagaatgtcactgtaattgaaacaccatggatgattccctgattggcaataaatatcctgaccccaccgtatctgtgtggcacggcgtcgtcaccggacgtcataccctagccagaggtatataaccaccatatatttttggcgtgttcagctgagcttgagatttttgagatttaccatcataatatcctcaaaaaccagaatatatatatccaaactttcaatcatgctatccttcctcttcttcctcgcctttcatgtaattctacttactgcttgggtctctggttacctagacccataccagaaacagcttcaagagcttttgctggactatatgggcgagagcaaggtctcttacggactgaaaagtatgtcatgccaatgagagaaagaggcaaatgaattatgaattcatactaatctgagtttacttacaggaagtctcactggcaagaaactcaccgaggaccagaatctaagcaagattcaagatcaactcggcaatcaactgggtgacatgtttggaaaaggaggtctgggagagggattgggttctgtgttgagtaagggtctttgaattggccattggagttgaggaagtctggaagaattgttgcgcagtcgcccaattggtttgatgcaaaagattacgatatgaatggtgttttctctgttacagattggacaaaggtcgctgaaaacatatccatgaatttgttacttaatcttcaacatgattttagttccaacaatcaaatgtcttgctattcctgcccttgtcccaccgaaccacaacctagataatcaaacatagaccatgatgacactcatgatctgaattgatatccgcctagacggattcaacaacgcaacacctatcgagcaccctgaatcaaatagccccagggccaagaactgaacctgcatccacacctgcacgacacccaacctccgaaaaatcaaagagcaaacaatcaaagaacaccaacaaaagaataagcagcaaagtctcaccgctgcaaccagtcccgggatccataacctgtctcaccaagctccgccaaagcatcctcacaaaggttatcgtagtactcagtccccttccagtgactgtgcttcgactgaataccaatcctccaatcctcctccctgagccgcttgatgcgctgtgccttagtctcaacccgaataatgtttccatactcatcgagattaggtccctcaatcacaggaggttcctggggtccgccggaagtgctaggcttcacgggagaaaacgtccagaaggatgcagagcgagccatagtcgtgttgcgagagcgacgcgcatgctgcatgtccgaaacatgtttgatctccttgcggagcccggtaacgtcggcgggaatgtgctcgcggagccacttgacagcgctgttgaagttattgatctgcgcggcgcgttcggcgctgacaggcgctggagagggctttctcgactgcaacgagggcgagctgacgctttcctgccctggtgaggctgggcggctgacgaatggggaggcgagggggggcatcttctttcgcggaacgggggttggtgtcgatggagtcatggtcatgggcgaagggaagaacggagtcggacgctttggccgcggtgctcggattgaataactcttcttctctgtgttagcattcagatttccggctgggactattcccagggcagccggggagggcgagctcggccgggtcgaatcacctctttcatagacgtttgtggctctttgcctccatggattactattgcagagttcctacacatgtgcacttcgccggagctcttccgaattgcaagcggggatggaatgagctcgcgacgcttcactggatcgtcaaactcgactgggaacttgattggagacagacgcaatggtggccgctttggatcggcaaagtttggcggcgcacgagtcagaaaagggtcgtcggctgctgcaatcatggagttatcaatcatccgggcaatgtttcggacgatagatgccccgttgggaagtctatctctggcactgttaaaagagagcaattgatctctcgtagctgggcgagcaggagcctcgcatggtggtggaggaggaggccgggtcggaggagggatatgaaaagccgggggaggggcgtcatggtcaaaacgcaagacttctcgagcaggagcaggaggtggagtgatacaaaagtcagtggtcatagatgagcttgaggcgcgagagggagaaggggcaggtacaggcgcaggaggagtttgaaccatcctagcattaaaagcggacagatttcgaactgacagagcttcagcatttggaccaggaccaataacaggagtgacgccatggtccggtgaatgcgcaggactccactcgatagcactcgaggaagaccgggcagacaaggtgggagaatgaagaaaagtaactggcgagtaggtctggttgggattcaaaactggggctgggatagtagctggcaaagactcataggcagtctgaaaccgctccatagcatcagtcagaagcgggatcttgacagccgaaaatatgtgagctgttcgtcccataaactcatatgagatggctgcataatagtggaggtaggtcgcactgatcggatggagctttatacaagcccattagttatcagaagagatgagatgaatgaggcacaaactggactagatgtagtctctatgagctggttgcaacgcatggcgcattgtttgtattgctggttgaaacagagccatttcacatcggcgagggctttcttccattcgtaggcatctcgtggaggagaaaagacaccaaatggcaacgaggtctccggtggcatttctggagtggaatccattttggaaacaaaaggaacaagtgaatgaaggatgaagaaaagataaaacacgagatgggatggaggaagaggacgaagagagggacacgagacgggatggaggaagaagagagggacgcgagatggggtgagaacgtagaagaaacaaagactggagtctcccaactcagagtttcccagacaagtccatttctcatatttgcccacgatatctatgccttcagtcatgtttaccagatttggccagctcccaggacactcaagcctaggcatagctccaagtgtacatcatttaccagtagccaggaatactgttcatattatcatccttaagagacctacacagtgtacataggaattgtagataacctggatgatttccgactaaagatatttactagaaataatatggtcatctagacctgctcaacaacctgaacaccattcgtctcatgcttgatctccacccgtgacaatgcctcgccagtcgccgaaagcgactccaggaaatcacccagcaaacggtcaagttctgccgtcaccacaccatcagccataccctccatcagactcgccgcacttgggggattgagagccgggaaggggattggtcccttgtcttctggctgtgacatgaggacttcaggcgtgtcgtgtcgtgcatttcgtacggtttcgaacacgggagatcccggttctgagactgggcccgaagtcaccgaggtgggcgttgggggaattggaacggccgtgggtaaagctgtcatactaatttcgtatgaggaaaccctggagtgcatgttccatgcagggtgagattcttcgtctggcccggggccatcttcgtcgggaccggggccatcttcgaccccggaagcctcatcttcactataaccggctaaatccatcatcgcggggagttcggtgtcaaagaattgactgcgacgaagcgagtttgcgtcctgtggggtggtgggacgatcgaagcggaagggatcgtaatctgaatcagaggtatacgatgccgcggtcgaaggacgtgagtcacctggttcacctggttcatctgttgactgtggctgcgactgcggcggaggttgaacctcaggcagcggagcccggagggtgtcatgtcgatcgtcgtagctttggctctcgggcacagatcccatgactgggaatgtccactgcatggtagctcgcttttcagcctggaaagactcctctgttgcgggctcatgtggaggaacttcctcttcctcttctttcggcttttcctcttcgtcttgaacgaatgacgggaatttccagtccatggtgggaggtcgaggaccagacggcacaaatgtatcttctaaggcttgatcatcatccgcgccgctatcagacgactttgagctattctcagaggagctcctgttcaatcggagactggagcgggtcgcgcggatagtgttcgcatcgaccaattggaaaggttgcgcagatggagctcctgctgcgtagtgtgaggcctcgaatgacccgatgtcgatatcgagaaaagttgatgtgacagaagagcgatctgtttccgcacggaggggaagatctgaagtgggctcgggttcgatggggacaaagtcattttttgtttcgtatttgtagctaggcttctcctcatcaaacaggcattccagtgccgctgcgcctcggcgcacacgttcatcgaaattggccttatcttcataattaagatcgtccccggaaaactgttcgtacatgtccagctcaggagaagcatcggtaggactgatggattgctccatctccgccagcgaggccgcaatttcatccaggtcaataacggagaatcttcgctcgaacccatctgttgtactgaaattccagtcatcttctgactcctcggtacctgggagttcagctgccgcggcaccgcctggatggaacaaagagattcgctggcctcctcgctgggaccattggtagtagtttctcaccaactcactcacggaggcggtcggatatgcctcctccgtatcggcaatgtacgggtgagcaagaatatctgccatggtgggacgagtatacggattggagtcaagggcgtaggcaataaggtccttcaggccttggctgtatgtatcgctgtccagtgatggcgtcttgcgatttagttggcgaccgatttgcattcgttcccgcaggcctgcgtttggcggattcccgttggcgaactcgaacagtgtgcacccatacgcccacacatcaatctcatgcccgtattgatgggcctctccacgagttgcaaacatctctggtggcatccagtgtggtgttccaatccaggtggatcgtttgtctcgctgtgattggagaacaccagcaacaccaaagtcacagatctccagacgaccctcttcatgaataaggatatttgcagctttcacatcgcgatgaatgattccagcttcatggatggcatgaagtccaacagccagctcacgagcgattggaatgatgtatttctcatcgagcttgtcgtttgttgcacgcatcagggtacggacactgccaccgggacagtactcgcagactagccacaactgagagtgaattgagatggcttcaatgatttcgttgatgtttttggcaccggaatccttcacttgcttcatcacctttgtttcatggatgaaatcctttatcgactcatctctgaaatctcgaagtgacttgtagtctagcgagtcaatatctaggactttgatagcaactagctggcctgatgatgtttggtgacccttataaacacgaccataggcacctttgcctatcaactcttcaaactcgtatggtgggacctcggttttcgcacgacgacacatctctcggacggccactccttgttcacgagctagcttgattgcctccaccttgtgcttggtgatggccgccattgcagaggatgggtctaggagatgagaagctcgatccattgtgagtgaagataagcttggaatgaactaggtgtgagataagataactgtaaaaatgagataggtataaaagtgagtaaacagtaaagatagagatgggggtggagtgagatgagttaaaagggattttaaagatatgcgactcggtgcggagttaatgattgaatgcggatggagtgcgtttgggggtgtgacaaagcagatgtttgagctttttaacaaaacgtttcaagattctcttgcgcttcggtgtgctcctatttctagaggcaagagagattatcgacggacgagtggagagacgaagaggcgtcttttggtaataccgaggggaatccgtaggtgtagagcaaccttcgaagatactgtgaaaagagtgctgttttctgatcacgtagctgatcggacggaccctagaggagtatgaggggaaaatggtgtatttttcctgatttgcgcgctcctgagcctggtcggaggtttcgggatccacttgttgtccctcgtgatagtcggggagaggcaactctccgcaagaggcgctgggggacggtgaagggatctgagaggaaatcttccgagtgttgacgacggctgaagtgtcgttagaacacggccgggagattccagaagaactagttggtagcccactgttatcgagtgcagatgtatccgctttggcacagactctggaaggatcttgttctccgatcgggttgctgtccaccaaatcttcagagaatcgggaaatccgaggtaggctggtcgcggatttgatatgactgctggtgagtgtcgacgtattagcttgggcactgtctttgggtgacaatcgttgggtggcagaatagacgtgggagaaatcttggtccacaacggtttgatcgcgaccgggaggtcttgggaatgattcaagtagcttcttaaagctcccggtgtgatttaaagtccttgggtcctgggatacttcgcaattcccttgggtttcaggggtttcgttgaggttatcaacagaatcgggcggctcacctttttcgctgtcatagactgatgagcatgggggttcaacagatccagggcgtttaacgttctctgatgttttatggtgttcgggaggctccggggactcgagacagggaggctcgtcgtccgttgcaagctgttggaataactcggatagtagagattccgaatcggcaccgatgagggaagtccactcttcttcgtagtgaaccaggtctctgccttctgaatcctcgggaaagtcactaggacgatgctggaaggattgtagacgaaaatgattcgcacgttcactggggacagtatgttagtcaacgagattcacccactagaaggaggagtatcttgccagagcctagtagatgcaagtctacgagcaagactagtagagctgagttggcgagattgatcttggctgtgactggcctctaggtccagaggaagcccagcaaatgggtcggatgagccgaagagacgaagcaagaattggtgctcacttggaggaaatccgagctcctcgatcaaatcgtggagactaggagactcgtcagccattctgttttgataattacatcgacggtatatcaatcaagctcagaggtcaattcaatgatgggagaagggtagaggggatgaaagcgattatctcgcgccatcaatgattcaggaacctacctggtcctggtcgcttatttaatcgaaatacaagccaccacctgggaaacccgaaaatcgagtagacaagccgagtctcaccatttgtctttccaatatggaatgctttgtagggacaaatggaccttaacaatgaactaaggcagatatggtatttcagatcccacagccaggttcatacacggcttcccactggtgtagtgtaagtcttgagatgtgtggatatcctgaagaagaagaagatgaagaccaactgccagatgttgttggcgatactgtggcacgtgatatatacatccttatcgtgatcttaaggagctgaccgctttgtgttattttaaagggagattgaagttttggctttaaactagctcactaggcctagattttgaggttcttccaatttcacagatgatatcagcaaggtctagtgtagaaccttagaacgcattatatttcattagatatattactcttggcactattcgatgattcccagccttaatggggatcagcatagattgcttatcgtgaaagcttatcgtaatttctctctttcagttgctgtccatggctgcgaatggttataaatgacccggtgagatgacacaagatatgattcaatagaaacactacagctagtgtgccctattgggggccagtcatatcatctatgataaaggctgggaaatttggagcatgataggcccaacaaatgggatctggtagggcgacatatatagttgtgtttgatagagccatcaaatcaatgcgcttaggtggttttaaacttcatcacaaactcattggtttgctgcatcccgacccatgctagaatattcattgggacttagcatcaatcctggtctttatatattccacggttgtgcttctaataacaagagtatcggtcacagccagggatgattcaatcgactttctaacggtaatgcagaccattcatgatagtagatagtctggagccgctacagcgtttatcgcctcgaaatataacacaaacatggtgacattgagcggacctaagattcattgccgaccgtccggaatgccacatcgatgctctagttatggcgtggtgtcttagtgagatgttagtgcaaaataattctttgagaagagatcgttcattataagaaccgtattctccctctttgggtagatcttagtaacagtgccattggacacagtacgaacggaataggcgttcttttttttttcagagacaaagcatatattgtatgcaaagaggcgcctagtatagagctaagaaccacgccccactacgtatgtcgatcagcagttaagcgtgggaatattttctaacttattcttgtactacggatcaccgggattttaattctagaagggtaaaattttatctaactaaattgacacaaaaccgatctgacttggtcacaataggactcgcttatcgaagggactctgagcgatcgggtggcccgctgggtcttcgagtgtcggggtctgtttaggggcatgtcggggtctatttagaggttagcttagagccttagacgcttataacgaagagacattacatggttatacaactctatgttatcaaattacggtcttttatttccaatatgagaagtctaaaccaaggcaacctagcacttgggcctgagctaacttttgatggtcttttccgtagcataataggtagcctttgcaagacaagcatagtgaggagccaagaggccaaaagaggccaggttacactctgcactacttcagagtattgataccagttattagataggtggactgactcaccagattattgcgttggctattccttacaacatatatattgaggtggctgccgggactcggcgccggaatactcgggttggaagacttgtcctggcttatagactgttttgacatccactattttgggtatagagtcaagtttttgacagacttgagcattggttttattagttttacctcctctatacatgtattgcactcccatttcttgtaatgtatgcaggtgggatgatttgatgcctggatgccttggtgacttagctgtccccactagttaatgcacggtggtgctgcacgagctagtggaaacaggtgaaaatttgcttaaagaagatgtaggagtgggattttcatttcaatgcgattgaatgttttaagtatctctattttggattatatccaaatatacatatgtatactagtacatagttgtatagctgtaccgtacaagatacattccaaggttgaccgatagttagaatattaataatgtgcattgccccaccttgatagaggggttttgggcaggaagtcaagtcattcttagaaaccctggaaacataaaagcgtgctgtgaatcataggctttgagatgactctttttaagcatttagtacgatcaaggatcatagctagagatataaaacgagtcggatgacatctctcgcttggggtatggctgtcaaaacgtcaccggagcacccacggatggcaaaaacagacaatatagtgagtcaggacatgccaatctgaaggatttgaaatcaagaaaaaagacccaaagtaattgaaaggaatataagcaattaaaaaacgagaaacggaaaaaaaccgaataatataaacggtttcataggcaaacaggccagtcagctcaaaacgcacaaaaccgggaggagaaaaaaaagtccccactttcgcttttctttttttcctctcccacttttccttcccctcttcttcctcttcttttcccctctatctctgtccaccaggagcagctgcacatagaagtttttgattcagcgatcgagaagtctcgatcctagtcatctgtgtgctcttcttcttttcttgtttatccaagttaaactaaggatcaaccgccaaaatggttaagtaagttgaccttgcttgagacctcgatgtcctagaacgtactaacaatgatgtgaacagcttcactatcgaagaggttagtatttgcctttcaagggttccaaggttatatcaaacactatcaccagaagaggagacatattccctcgatggctccttcaaatgcctccatctacctcccaccgctggtgatacttgaaaaacctttcaaccatttcccttgaaacacaacatcatcaaatcatcatgaatgtcgatactgacctagatcagatccggtctctgatggaccgtcgggctaacatccgaaacatgtccgtcattgctcacggtaagttcagacggcagaggaagcgatatggtgaaatggttgattctgactcggtctctgtgcgttagtcgatcacggaaagtccaccctctccgactccctggttcagcgtgccggtattatttccgccgccaaggctggagaggcccgcttcatggacacccgtcccgatgagcaggatcgttgcattaccatcaagtccaccgctatctccttgtacgccaagttccccgacccagaggatcttaaggagattccccagactgtcgatggatccgagttcctgatcaacttgatcgattcccccggtcacgttgatttctcgtccgaggtcactgctgctctccgtgtcactgacggtgcccttgtcgttgtcgactgtgtctccggtgtctgtgtccagaccgagactgtcctgcgtcaggccctgaccgagcgcatcaagcccgttctgtgcatcaacaaggttgaccgtgctcttctcgagctccaggtctccaaggaggatctgtaccagtccttctcccgtaccattgagtccgttaacgtcatcatctccacctacttcgacaaggctctcggtgacgtccaggtctaccccgaccagggcacaatcgctttcggttccggtctccacggctggtgcttcactgtccgccagttcgccgtccgttacgccaagaagttcggtgttgaccgcaagaagatgcttgagcgtctctggggcgacaactacttcaaccccaagaccaagaagtggaccaccaagagtgagtacgagggcaagacccttgagcgtgccttcaaccagttcatcttggaccccatcttcaagatcttcgccgctgtcaaccacaacaagcgtgatgagatcttcactctcctcgagaagctcgaggtcaccctcaccaacgatgagaaggagctcgagggcaaggccctcctcaagcttatcatgcgcaagttcttgcctgccgctgatgcccttctggagatgatctgtatccaccttccttcccccatcactgcccagaagtaccgtgtcgagactctctacgagggccccatggatgaccgcgccgccatcggtatccgcgactgtgaccccactgctcctctcatgctgtacgtctccaagatggtgcccaccaccgataagggtcgtttctacgccttcggtcgtgtttacgccggtaccgtcaagtccggtgtcaaggtccgcatccaaggtcctaactacgtccccggccgcaaggaggatctcttcatcaaggccatccagcgtaccattctcatgatgggtcgcttcgttgagcccattgaggatgtccccgccggtaacattgtcggtctggtcggtgtcgatcagttcctgctcaagtccggtaccctcaccaccgatgagactgcccacaacatgaaggtcatgaagttctccgtctcccccgttgtgcagcgctccgtcgaggtcaagaacgcccaggatctgcccaagcttgtcgagggtcttaagcgtctctccaagtccgacccctgtgtcctgaccatgatcaacgagtctggccagcacattgttgccggtgctggtgagctccacctcgagatttgtcttaaggatctcgaggaggaccacgctggtgttcccctccgtatctccgaccccgtcgttgcttaccgtgagaccgtcgctggcgtttccagcatgactgccctgtctaagtcgcccaacaagcacaaccgtctgtacatgactgctcagcctattgacgaggaagtttcccaagccattgaggctggccgtatcagcccccgtgacgacttcaaggctcgtgcccgtgtccttgctgacgagcacggctgggatgtcaccgatgcccgtaagatttggtgcttcggtcccgacaccaccggtgccaacttgctcgttgaccagaccaaggccgtgcagtacctcaacgaaatcaaggattccgttgtctccggtttccagtgggctacccgcgagggtcccgttgctgaggagcccatgcgttccgtccgcttcaacatccttgatgttaccctgcacgctgatgccattcaccgtggtggtggtcagatcatccccactgctcgtcgtgctctgtacgccgctgccatgttggccgaccccggtctcctcgagcccatcttcaacgtcgagatccaggttcccgagcaggctatgggtggtatctacggtgtcctcacccgccgccgtggtcacgtctacactgaggagcagcgtcccggtacccctctgttcatggtcaaggcttacttgcccgtcaacgagtccttcggtttccctgccgatctgcgttccgctaccggtggccaggctttcccccagtccatcttcgatcactggagcatcctccccggcggttctcctctcgaccccaccaccaagcccggtcaggtcgtccaggaaatgcgcaagcgcaagggtctcaaggaggtcgttcccggttacgaaaacgtaagtctttatcctcactctcgttggtcacagttactaatctggtcttatagtactacgacaagctgtaaaaatgttcacggtcacccagaatttcccttctgccagtcattcgtggaatctttcatgagattgatgaattcaatacaatttcttcggttcaacaaaattttattccctcattcgtcggtatttgcttcgatcgttccgcctttagaaatcaggacatgaatattgaagcctctaggtatcattgattctgtcctttcattgccgtttctacatttggtttttctgccgagggttttttgctttttgcgtttttgctgtagtctagcagccagtttcgatatgaaaataaacttgggtatgctaggcacagtggttcatctgtagacaagtaattgtaagcataaaaaaaatcagcgaaaccatgactccgatcgcaatggtagcttgaggagttgtgttgtcctatgtcattcaatcacgtgatccaccgagcctcgcgtttttccttcacaatcgcgctcctagccatatccttctattccctcacggttggggtgaatgcttatcagcttaaaataacctattctcaagcattgttatctgaaatacaagggtgtgattttatcgcatatacaattatcactgcacacgcaggcatcttcccgcgtgacggctttgtttaaaccgcatccctgcaatcatcgccactttcacttcgatcttttgttcgatccaattcaatcctcacggtttgaaattgctcggaaataatcttcgtcatgcagtttactgatgcagaagccgctgacgtaaagaaatgggtggtaaaaaaactggaggacatgtgagttgatcaggcaccagaatcggggactgagacccgtggattgccctaggggaagcaaactgagactaattggctttattctgtctttagctcggatgccgactccgacgtgctcgcagactatgttttggcgctagttaggtccgatgcgccagccgaggaaatcaagaagatctcggtggaaaacttggaggatttcctgcgcgaacgtgagtccatatctcaatcccgaattgtttcatacaactaacaactcttagacactcaaccgttcgttaccgagctctttacaacattcggtcccaaacaacccgcacctcctacgcccgcgcctgcaccccagcctcagcgccagccccaacctgctgcccagattcctttgtcacagcctcctgagaatgcccccagcggcccgagagctaccgtcaccccgggcagtgccaaccggaaacgaactttcaatgagggattccagggggagccggatcacgacgatagtgggttccagaatcgcgctatcaagactgcacggcgtggtgggcgcggaggtagtcgcggcgacttcatgggcggacaacatatgcaagcgggtcaacaatatcctccacaacaagcgggtcaactgtttcctctgcagcaacaaggccagcaattcccctctcagcaacaaggccagcaattccccccgcatcagcagggccaacagttccctccgcagcagcccggtggcttccctatgatgccaggtttcccaccgttcgaccccaatgaccctatggcagcaatgatggctatgcagagtatgcaaggtatgggattcccgccgatgccggggatgcttatgcccgggatgcccggtcctcccggtcagccaggagccgatcagatcccgaaaagcaaccagcgatgtccattctatgatacccaaggtatctgttacctaggaaacacttgcccttaccagcacggcgagggagtctcgaaagacgatggtaagaacaattcatttatcctagatataccattgctaacaatcgcagaatatgaccccaagaccgcgggtacgcatgcgcagcggggcggtgctccttcgcgcggtgaccgtggccgcggccgtggtcgcggcgggttcagcggacgaggacgcggccggtccgatttctcatcggcaggacctaatgaagatcagtctgttacgactattgttgttgagcagattcccgacgacaagttcaacgaggattctgtgcgcgagttcttctccgagttcggtaagatcaccgaggtttctttgcaaccctacaaaaaggtggctttggtcaaatacgagactttcccggaagccaaggctgcgtggtctagtcccaaggttatcttcgacaaccgcttcgtgaaggtttactggtacaaaccgaatcgcgatgagacgcacgacagtgcacaaccggaggccccagccttcaacaaagaagagttcgagaagcaacaacaagaagcacagagggcgcacgaggagaaaatgaaaaagcgacaggagaccgaagcagccaagcaggctctagaacgccagcgcgatgaacttatcaagaaacagcaggaggagcgggcccgtctcatgcagcgacttggaggcacgacagacacaaacggtgccaccggtggtggagacgctatggccaccgagcctccagctgacgagaatatcagtgctgagacgaaacagctgcgagctcaactggctgctctcgaggcggaggcaaagagtcttggtctcgaccctgcggcggacccttcagcgcggggtggctaccggggtcgtggtggcttccgcggccgaggcacgtaccgtggacgcggcgcttacgatcccaacttccgcggaggatatcgtggacgcggtggatttgcggctcggggacggggaggtgtactgcgtctggataaccggcctcgacgagtcgccgtatcgggcgttgagctcaactcagacaaggacgaggcattgcgtcagcacctgatggtaagttatgtatctttctaaccaagcaaagcgtgtactaatttgttgtgttctagggcgttggcgaatacgaatccatcgaggcacacccagaccagccaaactcggtcgtggtggcattcaaagagcgcttccaggccgagaagctaatgttctccccgtggaacatcccctccgtgggcgaggttcaactcacctgggtgcccaatccgcccgttgtacttcctaccgctgggtcatccacggaattcaagggtggtattggacaggacgaaccggaagacacagtcatgtcgtcttcgtcggtggccaacagcgctcctgcgcgggatatggattacgacgttgcggaggatgacagctggggcgcttaattccgttacttttcgtgtaccagcatcatatgttggttgtataggctgcattaagctatttttacgggatggacgttccattccgacctgttgattaaacaaaaccgtgccaaaatcgtagatcacacattttgaggaatcaactcaaccgtatacccatcctatccgcatcagcacaataccttaactcagggggccatagaaactcaccggatcagcaaccatagcaaacttctcaaaaaaccacgcataattcgcatgaatctcgccgcgcgcaatacccctctcctcctcccactccgaaagcggcaccgcctccctcgaagaaacacccacatccttcagaatcctaaccccaccatcccgcaacctctgcacagcagccggcacatcaggaaccgtgaaccccaaatgcgcgaatccaagatgcgggggtacattccccgtagaaataccaccagcacgatccgcaccaccatcaactttctccgtaccatgcatatggaacaactccagcagcccgcacgtcttcgtcaaaacgggcatttcgctcgtggtcttcgcccacgcggtaatgtcgtcttgggtcgtggctgatagcggcgggtgtccgaggtagtagattgtgaaggggccggcgttcatggtgaagatcatgcgcatgcctaggaggttgatgtagaagtttagggagcgggttgggtcttggatgcgtagggctaggtggtttagtttgtagtcttttgttgcgggtgttggggctgggtttaggcttggggctgcgttgaagaggcctggctcttcttcttggggttggaggtggaggtttgttgaggacatggtggatggatgtatgaatgagtttggtggaattgaatcaaggtgcgcggggtatataaaagatatggattttatagaatgaggggctgtagtctgctagtaactagggcggatccattgggcctatcaaagagaaagaactggatatcttggaatagttcatagcgtgcatcccgagttgatctacgatagcgtgccgcatggataacttcaagagactacatctattgataaacaatcatatcaagacctccctcatacggcatcgtcacccgtcggaatccactgccctcggcatcaacatacgcaaagagctcctgatacctatccttcgccttgacagtattatcaacgatgatcaccgcgccaggccggaaatgcggctgaacaagcttcagcgcagggagggcgagaggcgtccagactaggtatgtagtggttagcatatatgcccgctgctactatcacgactagacatatccgtataggtgcgtgtgtgtatgttactgcatcagcccaaggaaatcaacaccacttactatccaacagcaagaaatccacagtccccaaatcggaggtaagagtctcacgcagatccccaacacggagatcaatcacatcctcaatctccttgccagctttcgcccaatgctctcgagctatcttagccttagactcttctttctccgtggcgatgactcgcggcttagtggtggcgctgacgcgcttcgcattctctgcgacggcaagcgctaggtagatggtgctaacgccgaagctggtgccggcctcgacgacagtctttgcgttgatgctgcgcaggatgtggtagactagttcgcacttgtcctggtccagtgcgatgaacttgtcgaccatgatggagtcgaattcgggactgcattgttgcggtaggttgtgccagtccacggttgattcttgggttagggatttggtgtgtaggtctttgaggtgggtcaggacttctggggaggctgtgacgggtgagggtgccattttgtattgtattggttatttgagattaggaagttgttatgttgaagtacgttttggaatgcttggggaaggtgattgaagaaactaaggactaaagacctagcaaacggaagtggggaagggtggtggcacgtcaaaaagccctcaaactccgagatccaagggaatcaccggccccgtgttaattccggtgtacgccctatggcggggaatttgtggggacaagaaggagaaagtgccgagatgctaaccgacatgactatgatcagtacgcctttgtccgatgctataatgatcattaccgttcaattggccctaaccgccgagagtgcaagcacagcaactgaaactccatactactgctctagcaagtccgcatagctattcaaagacttcccaatcaaagaaaccatctcccagatataatccgccgtaaacagccgcgcccacaacctggtgaccgcagcactgagccgtgtattagtagcgagcagccactccctcgaaacaccatgctccacctccataaccatctcgagcacgaaatctcgcaaccgggtctcctgctccgtaagccccgggtccggatccggcaccgtgatcgcctccagccacttagccaatagcaccgcgcactccagggagcacaaagcgtgctgattcgaccacagagccacctgcgagtgcgcgacaaatccaataccgagcttgacaggtgtgctgagggcatgtgcgcagtggagtgcagcgcgtgtgagacggtcgccgcgtcggacggcgaggttgtcgtggagactggttgcgatctgcacgggatcccaggtttgcagttggcgggctgagccgcagtctgcgttgagtcggatgtaggctagtcgaagcagcgctgctgatgtgaaggatagcgggccgttcgggctgagtgggtcaacggaggattcttggttgcgctcccagcactggcaccagcgttctagtgcctgttcgacgtgtacgagctcgggtgtgggtgccattgacgatggagtgaagcggttccgtcgtgacacgggcagtcggcccgctttcgtcatgagccagatgtcttgcaggattgcgtggattagcacgtagccgccgagagaagaaaatcgctctacattgctggttggtttaaacaaggcggaaagggcatcctggaactttggctcgccaggactcttcatgcgctctatctgccagagatctgagcgcggggcttgccattctttttcggtgctgggtagttcgagtgtgaaatcttcagtgagaatcatgggtgggacgtcgaacacgatagtgtggatattgaagaaacagaacacaattagtttcgtgcgcttcacgcattcccgtcgtatccagctactccatgttccgtcctgctccggtagccggttgagtcctccttgtcggacgactatttccattagactgcgaagcgacagcgcctcgtggtatggggggttgttgataaaccataacgacaccgaggtcatatacaataaagcttgcacagtttgcagggtaccaatgtcgtcggccgcgttgaggccgggcgggggcagcttgcccgactggaagacccggcgaacatgttccatagtcactggtttggcaatctgatagagacgaaatgcagtgtctggctcacggcaataccgtgcacccaatgccgccatcgctaggaaatacggtaaggtcatggaatctacatcgaaggtcgggatatgcacgattgggtagtgctcgtgaaaaccggttacatacccggtcaaacatcgggacagcgcatgtcgagatggcatcgatggatctgggaccacattggcgtagtcggctaacatattcatgaacttctcccggcattccgccgtgactggtacgaatcccgtgggctggcgcgccgcgggggagatgtgatgatatccctccggctggagggagggcagctgagtgtcatttcggggaagtacagagctggaaggagtggaaggagtattttcggtcagcgcccctcgatcagaagattgatcatattccggcaccggggagaagtgcaacggtgggaatagcgggagtggctggtaagccggagagaacggatgatttggcaaggggacgctatccaaaaacgaggtgaagtcatgagcttgatatgatgccggcccaaagccacttagagcatagccaaaatccgggccaggggatggggtggtgggtctttcagaaggagtgtctatgctggccaactgagtacccagcaccgggcggtgtacggctggcgacaatgatgtgaaatggtcgacaggcccttgtagagcgctaggattagattgtgcgtggttgactacagatgccaaggagtttaatccgtccaagggagaaggatttgcgggggagggcgtgtgtgtgttattgctggctggactggcatcagggttgtgagagagacgctcatgacgagccagcagatccctagaatggtgagtacatggaactaatagatgtactgaaattatatatcgtacttgcgtgtaaaggccttgggacattgaacgcaaacaaacggtttctctttggtatctggggggatattagacggagtattcggtccgaggtccagaagacatacgtgagcgatcgtgtctttgaagatgctctagccgggcaaatgccctcgggcatcgctgacactgatagggtttgctattcaacattgggggtgaacatgacgtggagggttggatggtctcggggatttggtgcacaactccggtgagtctgacagggacattattccctggtgtgcccggttcacaagtacctccacaaatactaccacggactaggtcgaatcgagcagaatatcatgaaccttgtactggtcttgcatcgccaagcacttattggcctagtctgccgattcccacgatgattaatgggctgtaccgaatcggtgcaaatcccgaggtctccgaattggagaaatttcatgcacgtgaccgccaatggttaattgcctctgcggagtataccccgtattcgcatctatgaactcgcgatgcgacgctggaaccgtcatttaatactggtttctttattttactcttctaattctgaaatcagcaagtcttattctcttcaaatcatcgagatgacgtgaaacaccgtcaaaaaaggagaaagagctaggccttgttcagtagtcgatatgcctatgactacgacgccaaggcacgggcccccacgtcttccggatggagcattatcagttccaccaacagcccaactttgtctcaatgtactccgtacatggtcggacctagtattaacctgcaaagagtcgtatacatgatcaacaggatccacattagtccacaagcaatgtggttcggatgataatatcaaattggagagatgataatatttcggggtttggtcctttctccggttttgtcttagttggactccacgccctggaagcttagcttagaaaactcttgccaacgatcattctgatttactacatggcatctacaacgcctgactcacttaaaccgcaatcaacaacagccatggcaagaaacgaggagactaccaagtctctatgcggatctcaagatatcgaattccgctatctagagctagagacacccttaccgaccccatgcattactttaccacccggccccgctcagtcaccaccaccagaagcgcccagtttagagaaattcatctctccctttctgtggccaaaatggcgcaagtccatgatgacttatatcgcttgcggggtcactgcgctagcaggttatgctgcgggcgaggtcagtcctgcatcagaggaactaactaaattatggggggtcagtaccgtcgtttacaatttgagcatcacgattttctgttgtgggtttgccctggcgccgatggcgctggctcccttttctgagattaatggacggaggccgatctttatcgccagtgggattctcttcgttggtatgtattactccgctgttttactcggcatatgctgactttctatgttaacagcttgtttaatcggctgtggaggcacgccgtcctttgctggattgcttatagctcgtttcttcctgggtgtgggtggatgtatgtatagcctgctccgaatggtcgcattcaattgatactgacttgaagcctcacagcaacattctccactatggtcggcggcgtgatcagcgatatctatcattcccaagatcggaacacgcccatggcgctcttctcggcatctgcattgttcggtactggcctggcaccgatgatctccggcgcaatcatctcccgcaccacatggcgctgggtgttctactcgcacgcaattgtgtccgctgcctttgtcattatcatctacttcttcttcagagaaacgcgcggcagtgtcttgctaagccgcaaggccgcaacgttgaacaagtactacgagcgactcgaagaagcaggccatcacggtgtaatactgccgggcgaagaagcgtctgaagaaaaatgcgttcgtcgaatcagatggaaagtcaagagcgacgagcaacgagaatcgatcgtaaccatgatccagatctcgctgtacagaccattccgtaagtctacgctaaccttcagtccaccatcccctaatgaatgaaagaaaaactaacatcctaatctagacatgctcttcaccgaacccgtggtcttcttcttctccctatgggtctccttcagctgggcagtcctctacctccaattcagctccataccactcgtcttccgcacaaactacaacttcacaatcgagcaaaccggcgccgtcttcacctcaatgtgcgttggcaccatcctcatcactatcatcagtatctatcaagatcgcatcgccatgcgcttcggtaaaaactccacttctcccgaggccaggctgcacttcgtctgcatcgagtccgtgcttctgcccattggcctgttctggttcggttggagttctttcccatctgttcactggatcgtgcctgctttggcgattggatgtgctaccatgggcatcttttccatttacctcgctacgtttaattacctcgctgatacatatcaccggtatgcgagttcggcgattgcggcgcagtcttgttgtaagcttttccatgggtcgttgatttgtatgtgatgatattttgctaacgtcttactcactaggtcggaatttgctcggtggtatctttccactggttacgaatgccatgttcaccaaccttggttatccagaggcatcgagtctgctaggaggacttgtaagttgtggcaattaacaccaagagaagaaatcgactgactggatcgaaatagggtgctgctttgactctggttccctgggtgctgatcttctacggacccaagattcgagctaggagcaagctcgcaagtgtaggtgatgcctttcattcatacacactgtttgagactaatggaatcataggaactcgcacattaaatgatctacaacgcataccaaccccgaacaagacaaagagtaatttaatcacagcattttagggtggaggattagagccaacgacatcatacatgcatattatcaactatccaggcctacctaggtagatagaccggtctgaattctcattacaacaaataaattgtcgtatcaacgtacgcttcctataatcggagcatggctacgctcagcaattcaaaaatccccacaatgctaaaacaatgtacatgatatgatccaccatgtgttccatgcaaaatcccgaaatcttagaccaaaacaatgtaactacctcgggcgttgatgccctctaaatggatgtgcaccatttatcccagagcgatacgatgcataccgatcttcatcatcgctatcactatccatctgatccaaaaggcgatcaatatcatctccagcatgagcttccagccccggtttcctttctagcccacgaccattgtgagattcggaactttgggagccctgacttccatcggggtgagctccgttgctggaagcgtggaccgattcgttctggctgctttgcgtgctcgttggttgcagcgggcgagggctgaaacgataacccgagttctcgggactggacatgaacattagggtttcaattgcgtcttgttccatgagtgtgttttgggattgggtgcggagtctgtagaacgcgttcggtgtgggtggtgcgtgtgtgtgggatgatgagagcgagggcgttcctggccctaggaccgcttggccgttgagtggtggggtgagtccgttctcttggtgcgaatggtgacgtcgatggtgagagatagggctgcggttggaagggttggagattgcgttagggttgggacgacggcgctggttatgaccatttgatgcaatgatatccacaggcggtgctagcttggggattggaaggaattgattagatgagcatgctgatcgcgagcggttatggctcgggaaataacgggaatttccgttggatgatgtttgggaatcttgtaaaaaatgcgtggagtttcctgccggtaatgatgctttgtcactcgggctcaatggcatgttgcgtgtgcgcagtgcggtttgaggggtggcttcacgcgactgtcgggcctgctctactttggcagccgcgtatgatagacgtgtacggatatggaccgacaactgggaaatataaatgagctataattcctgaatgagcgagtgggcgcgttacctgtgcaatcctactcccatgagctgacgagcccgtactcttcgaacgttgtcgtgcagccccattcgcgtcggcgctgtgagctgtggggggatctaaagtggatttgaagtcgccggcggctgttcgtttctggcctggggccaagcgagcatcaaagttcgaccttgtgcgcgaatgctttggcgatggtggcggtgatatagaaacattgccggctttgatcggcgataacgagggttgccatcgatctactgaggcgcctccattgaccggctgtatgtgcggggcgagttgggattccaataactccggatccacccacggtatcgatgtatgtccattcaatgtatgagagttaccgaactctgtcgactggctattaccattggccgaggaaggaaagctggaaagagagtctgtgacggtgctagcggaaaggtctagtcgtcggccatcgcccgatgtatcgctgccgcgctccgaggattcgatataggctgggttcgagttaccctcgccgggagcggggataacgacgttcaagccatctatttgtagtgacaatggtttcggtttcggcgattgtgtggttcgcgtcttggctggagtcgttggtttgtgaggtacgggaggcgtcgcgttgttcacagagtaggtgttcgcactggcctccgcatggagcaccccacgattagacacagcattgcgaccgtcattcatgatcaagggtggggcgtggaagattaaaagaagctgggatagcgacaatcggcaaatacgcgcgatctagctttaatcgcgagtttacgcggcacaatctcaacactcaacatgcatgtcctgtctcgccaagtcaccacattgagagttgggccgggaaggtccgataccaagttaattagatgcaactaacagtcgagatctcaacaagacgcgtgggagtactgtgggaaccagaagcgtctgcccgatcgagtggcgatcgaccagtacgcgcgcaagggttgcgacagcacgaggcggtaaatggggttctccaccgtgattctgaccccggatgaagggctcgacgggggtttggaaagaagaatgcgagcagtaagaactatttttgtatatagatacgccacaatatgctagtagcaaaagcaatcccgttgagtagttggtagggaaggctggtcttagaacaacgcgtgtgaggcgcggtcacgtggatggtactagaccaatttcatctgattcaataagtttatttaggaagagaatattctcaaatcatcactatatggtcattccgatgtaaagatggccagagatggttgtaagtgggtttacaaagggctatacttcggactatgctacgactccaacatctatgagactacctataacacacaagtaaggaaaacccttagaaatcaaatttggagcttcaattaatgataaaatatacaacatcatggagtcatgagaaatatgctccgaacaatgactcaactccaatgacgacagacatgtcaacaacaactcaacggaaagtaaaaataagccgagagggatctaagccctaaagaaaagcaagaagaaagaaagacaaaagaaaagaaagaaaagacaaaagaaacccattcctccgtactccatatcaatccaggcatcagtctggcaggccttcgatacctctaccagcactgagccaacaccaagtcccctagacgatggccgtcgactttctcaggtacttcggagtcagatcacaagtgatccggtcgatatccggagtctgagaaatgtggcgagccacatgagcaggcgctggcgcctctgtaaggaacattagcatcaagaacaagtacattttgttgatgggatcaacttacttggttcgttggggccatgccaggcccccatcttctccttccagccctcatacttctccctgcagtcctgaagcttgggcttaagcttcggcttccactccgcctcatacctgggcttcaacttaacccagctaatagagctatgagtatttctttttggatccattggacagatggtgtacttacattgtgcaccccatgaacacaccgaaggcgaccacgatgagccccaggagaagcttggtgaggatgacttccttccccgtgtcaacctcgtatttttcagcccgaggagagagcatgttgtcgttgacaaggcctgagataggagccatgtctttctaattgttgtttgatgtttgggaaagatgtaatgaagtctaagctttgatggagcttatgaaagatggatgtagttggagagttggaaagtgaagacagggggaattcacgaggataatatagcccagctgcgagtgctactaagcttgtttcggaactcattatggacggagtatgaagctttgagatggtttccgttacccgatgcggtgtcgggacgatggtaatacctcacctactaaaccacattaagtaggatgaaccttcaaatcctgggtttgtttaggactttcctgcttcgggaacgctctgggtaggtaactttgatgtgagtcaggcattctactcctggcatcgggggtcaaccgacggcgagaagcagttcggtcattgttattccgtagcgaatgtagacagcgtgggaggaggtaacgagaataaagcctgggcaaacagtagtgcattcatgaaatagttttgatataataaacatccaacataatgtaggtacaggttttgggtccaaacgccatctatgcaaaagacccaagtagattaagacatgcccaagaacaaatagatcacttgcgcttcttgccgcgtccacggccaccagagtcttcatcggggttcttgcgcttcttgccctccttgcgccagtaatcattgcgctctctcttctcgcgctcggccttcttctccagaccatcagccaccttagcgcggtagaccttgcggcgctcctcctgcttgatggatcgcttggcctgcttctcgttgcgcagggtagtgagcttctgcatgaggtcacgggctttcttttcctcgcctccgaggacaacggcacgcttctgcatgtaggtcggctccttgtggcccctcattttggtgatctgcgacttgaagggaagctcggcggctaattgtcttggcacgcggagcgggttgaagtgacgggcttgtctttcaatgggcttgtaggccgagtctttaatttgaggggtggggatgccttgagagtgacggacttcaccagtcaagcgcatgccctgccatccattatcacccttttcgccatcgacttggtctaacaagttggtcacaggattgtagtagcgatggggcttgatggggtaccaagcacgcaggaagacaatgtcactcatcaaaatcttgtcctcgaacgtagcacggtaacagccatcaggtttggatagcgcacgcttgatttgaccgcgaataccagagacagtcttgatggatgcaccttcgaacttggcaatttcgagcgcagaggtgaacatgtccttgatgaaggcggtgttcttgaagattttgtaaggatgaccagtgagtttaagcttcttgacaatttctgtatgctcatccacgctctgaacaacaccagtggcggcaatgcggaaaccaggattcttgtttgagaatgagttcacacagcagaaaccggtgttgggagcgacaaggggaccgtagaaggtagcgaagcagtgcatatgctcaggtgtgtacttaagcatacggtttcgcgtccgactgtcggaggtgctgtagataggcatggtctggaagcgacgccaaccaagcgagaagatcaatggatcgttgctcttgagaatcttcttgtgccagcgatgtttcttaatccggatctgcacgtagccgaatcggtcttcagtaggtgagagaccaccaacgatgacagggaagcgaggattgaacttagagacaaactcgtagggtacgttttcaaggacgatacgtgcgtaggtgccggctttgtaaccttcagcccgggcgcgcgaggcagggtcgagtgtatcgaattcggcgcggttgatatcggcctgcttttgcagcttggccttttgcagatcgtaccaatcgtcctcaccgaactcgccatcaataccatcatgcgttccgtcctgaacttttccgaaaccttcacggtcctcttcctcgaaacgcagcttcagttcttccttctttttggcatttcgctcgcgctcagcttcgaggtcagcagcctttccgggctcatcaccttcttcttcctcatcttcatcaccgtcttccttgataccgttgaaaacctcgccagattccaagtcttcgtaatcaccgtcgccctcatcttcatcctcgtcatcttcgtccatatcaccatcctcgtcatccgaggcaccgccagacagtttgccagtgatgaagcggagtttaattgattcaagcaactcctcgtcccgccacttccgctccagctcatcgtagtcgtactctggaacggcgcggaagtcggcttggtcttctttctcgttgtttgtcttcttgaagaaggtctcgccttcgtcgtcagcggttttgtcttcctcgtcctcctcctcatcatcggaatcttcaccgcgccatgttttcacgacatcaagtggagtgatcgactcgtcgtacatcattcttgacaggtcggtgactcggaaaggagggcgctttccatggagagacttggcattagcgagcatgttctccttccatcgaacattaccctcctcatcatcttcatcctcgtcttcgtcctcgtcttcatcctcgtcttcatcgccgctctcgacttcctgatccgagaccgaagagatagagcccaggtcagagtcgctgtcagcgaatgccatatcttcttcctctccaccggcatttccggtctgtttggccttaaagcgggcttcgaagtctgcaggtgcggacatgtcgagttcgccttcatcgtctgtcacatcgttttcgtccatatcttcatcggcctcttcttcgctatcggatccttcggggatatctatgtcatcttggtcgggtacggctacgcgggcacggcgtcgatcttttcggcccgtctcgtcgtcgtctgctttatcgagggcctcaccaccacggaacagacgaacaccctgatcggcctcacccagcatcttgcgctcgccctgaaggccaacaacaaggtgctcgccaagaccccggcgttcctcatcctcctcatcctcgtccgagtcccggtcgaaggtattggtcttgatatcgatgtaaactgcatccttgtctaccaggacaccgcccacatcagacatgggagcgaaaagcagcttctggtgctcgccaagcttgcgcctgttcgactttcccgttgccttggcgatctgctggttcatgaagggagttgggcatggatcgggcaagccctcaatattggcaacggtcagatcaccaacaccaggaacatggactcgggcgccatgagaggggaagttggtgccgcgcaggtagccgtagagcgcgactgtgcgatcacacttcgggttttcctcgatctgggtaggcggcgtgatgtccaagaagcgatctgcaagcgcgtaagggtgcgagttgcgccacacgagcggacgagggtttttcataacggacaagaatcgcgaaaggttgtgcacttcacgatcggggtaacggccgtttataacaccagacaagtaaaagagctttgcgcccgcgtatagctcactccagaaacggtgcttcaggcgcttcttcgcgtccttcaaagtgctgtgcttcttgaattgatcaaggtgagtaagaataccgaagacgttacccggcataccggccgtcgataaggcgttcaaaaactccatggtctccatctcgaatccaaaatttccgtcaatcatgagaagcacaatatctgcgatcttggaaacatcgatcgcggccgcaagagaatcggaagggcattcgatgaaggtgagacgcttgcgcttggtcgtaacaacggtcaacgggccttgcggcgagctgagggtttgcttggtgtagcggcggatcagagatttgagcagagttgtcttaccaactcccggcggtccaacgatggcgacaacgactggcggagcctcctcgggcatacgatccacgagggggacatgaagtctcttttctctgacctagaggagaagtccgggttagcatcaattgaccggtagaaaaattccatatacatacatcatgcgatcgcgcagcctgcttattgagctttccaggcctggaagtgacgaatgcttttggattagcacctgtaaagaaaaaaacattgttagcatgggctcgacagcaaaattgcagttttattggaacgatctcgccgtaccctcaaatttcttcttctctttggcagggcgatgcgccctgtttgcctgctgctccatgctatctgtcaagaggtataatacctcaacagatccactccttttattagaaaaagaaagaaaggcaagcgcaatccaggtagacgacttgttcccaacgacggtcaaaaaattagcagtaattatttttttgccaaagcggagtagataaaccttagtcaggggatctggagtgtaacctaaggcatcaacatttatccatctggcctaaggcataaatccttatcagctacccttatcatttaccggcccgtgatcacatgtaccggcccggtggctccactccgagccatgccctacctcaaagactccgctgcttgagctttcctttagtgtggattactagtgttagattccgtgcgataacgctatctaacatctcttaaaaaccagaggatgtaatttccctccgcgcctatcatgcggggcagaagtcgttgtacccgtggacctaatctaaagtacaagggctgaccaagcttcgacatcggaaaacccccgatttcccatactataaattcaccatgtatcctgcccgcgggccctatgagttcaatgtttctccgtatctaataaacctttgtgtaacatccaatctctaaactaccccgccaactgcatataatgtctgcacgccggccacccccagcttacacagcaccacctgattcgggggttcatgcaacttcccagttgtaccgctcaatctccgaaactgcatctagcccctctgcacggatcccgaaggaatcattcactatcagaccgtgttctgctcaagcatgggttgtccctgccggccacatctgccgcctgaccactccgaagggaccacaggtgggcgacttaaacatctggaacgcaaataacccacgagagcggatgtgggctgcgcgtacccggcagatccacgccacccacgtctcagtgggtgatcgcctgtggtcgaacttgccgtacctgcggcctctcgtgacgatcacgggtgactcgttgggtggcgggcagctgcatgatgttcttggaccggatggaaagcggaacccggatgtcgtgttcggaactacgcagtttggcgggcgggtgcatgacttgatgggcactcgatgcgatccttatgtgaacttgctcatgggcggagagacctttgacttccactgtcattcgaacctgactcgttccgttgtcccgtatggattgacggagctagatgtccatgatgtcttgaatgtgtttcaggtgacagggttggatgaggaaggaaagtacttcatggagacctcccctgcaaaggcgggtgagtacttcgagttctttgcagaagtggatgttctctgcgcactatctgcgtgccctggcggtatggcaccatcctatacgaatgtctcatttcaatactaattatatgctcaggtgatttgtccaattggggttgggatgataaagaaagtgatatgggatcaacttgtcgtccgctgggtgtggcggtataccaactggcagatgacaaggtcctggaagggtggaaggccccagaaagccctaagtacaagggaatgcatgggatgcagatgcctccccgcgaagaggatggctatgttggacactagggtaagaatatgaaaataaattatagagtcgtctattgaagggttcttgtcgctacacatattgccccgcgattctttagatatgatgtcattgcctcacaccgttacatcaacgtcaattcccccctttacaacatcccttgtaggccggactaggattagtatttaggaaattataaagccattcaagcaagggatttaatgagaatctggctttcagaaattgagtttgtagaagccaccatcccatgtcagacaggcatgtatgaccaatcacgacattttcaagtagcacggaagtaccgaagtatacaggatacatactatacaacgcgaagaaaggtaaggtgaaggagagaatgagaatgagaataaatgattggagggtacctgtttcaacgcaccttcccctaaaaaaatgcgtagccttcccctcgggcccctctcttctataaattctatttttctttctacttttcctcttccctttctccacgttctccatcttgacacatatcttgctatttgaaatcatgcctctctacaatgtgagcttagcttgatcttcaaaagtatccggactaacatctccctagatcactctgaagaccaacgcccccgttgaggagctggaaaagtgtgtccattaccaattatctcaaatgccttgatactaacaaatgttttcagggccaaggccttcgccagggagaagggtggtgtcatcagacatgagtacagcatcatcaaaggcttcacgtaagtgtgctggtttgatctatactatcgaggtgcatgctgatatatggatcaatactagtgttgagttccccgatgacaccgttcagaccctcaagtctactgaacatgtccacattgagcaagacggtgcagtgagccctcactagatgtccctagtcaacatgactaggaccgaggactgcagtccttgtgggtggtccgctttatgattgaatggaaacacgacatgcttgatatccgggggttattttctttttctttcttcttgttcttttttgacaagatggcttgataccaattatgcgaccttctttcatccgccatgcaatgtacttctcatgcttatctatcttttccaggtattcatacagatgatcaatcttcctgaatccaactatcagattgaagatgtgcacagtgcgtatgaatttaaacttgaaaaagccctgtataacacccgaagtataaattcacgtaaatacacctctcaccggtgagatagcgactttggaggttcgtgctgatctgcagcaattggaccgatgatatccgcaccgccggtgcagatcttccgtcccgggctctgacttccacttatcttgctccctatgatctacaattcacaatgacaacctcaatagctagaaatatgccttttcggcctagtcgccgggcccttccaattgggcgacctcatatttgtcgccaatcgtccacgcagagtcaaaactgggctggtcgcccatttgatgtcgccaaagacaatgttgcgcagctggctgcgagtccccgtcggccgttgacacttgcggacctactaaagtcagtctgatatagataacttataccaaagccgaatcaaaatgtgctaaattcatatccatccctcagacacggccgcccaccattgaacaaagaggctctactagcctctgccaactttactctctccctcctacccgcccgactagcttctcggatccacgcattacgaaatctccctttcatcgtcgtgtcaaaccctcatgtctccaaaatctaccacaattacctccattcgctctcgaccctcttaccatatcaacagcgccgcatcacgactctcgaagaagagaaacagttcggggatgtattggcagacctcgtacatacccatacaaacacaatcccggtccttgctcgcgggtttttggagtgcaggaaatatgtcagcccggccgatgtgacgagcttcttggacacgcatctacgtgcgcgtatcggtacgcgcttgatcgcggagcagcatctggctcttcattatgcatctatgcccatcaacgataacccagtcgatggtgctgatgcacctgcgaccgagaactcgattccatcaaactatataggcgtcattgacacagctttgcagccggcacgcatcatccggatatgcgaggattttgttggggagatctgtgagctcaagtacggggtacgaccgcatttaaagattggaggtgagcccgaggcttcatttgctcacatccctgtacacgtggagtacattatcacggagctgttgaagaacgcattccgggctactattgaaaatggaaatgagcgtgagcccatcgaggtgacaatagctgctgctccagatgtgccaggaaatcacccgtcggtcccgaatgatatcgatgctggctttgagcttgattcgaagcttgccagcgccaatgtgaatgaaatcattgggtactcggccccatcgtctcagagtatcacaatccgtatccgtgaccgtggtggtggtattcccgccgaggttctgccccatatctggtcgtacagttttacgactttctccgatatggactcccagggctcggagaacggcaacatggatgccttgaataccatctctgcgagcggtggccatctcagcagtattgcaggtcttggttatgggctgcctctcagccgagcctacgctgagtacttcggtggcagcattgcagtgcaaagtttgtggggatgggggacagatgtttatctgacgttgcggggagttgggagaatcgactgagaaaagaaactgaacgacagtactaaataccctgaacaagatcattatttttggctagtacaaccaactcctgatacctgcatatagcattgccttctacatccttgtcttgacggatggctggataaacatatctatgaaatccgagattaaagtatctggacgttgaacagcacccaatatccgaccgatctctgttgcagagaacataagtcccatgttttggaaaaacttatcttgtatcgcggctggtgttttgggatttcgcgcatgtcctacgggatactcaatcagtatttgaggcaacgaggacccatctttgagatggaccgtcattcctgcaccaatactcttcttgtccagatccaagtagtcctccgtgagcctagggtcgggctgcaccatgattctctctcgcagggcttcaagctcctcgctcttcgcccatgagctttcgtctaaatagtcagcagcctctggtgggctacccttcaagaaagccaaggtgaccacatactgaatgcaatggtcacgatcagcagcgttgtgcagcggcccatgtttattaatgatcaaaaaagcagcagcagtcgttcgcagatctattcgctggatctgtttcagaggatcggacagcccctcttgtcgaaatcgacgcgcttgcaaaatggctgcctccacggccgagatagcatgcccttctaccggcatacttttgaacagcacattctgtaccgtccacgatccaaatggtcgtggaaggataaaccccgcctcgccaaaagtccgttcccaaaacccccatggtttcgcgctcaacgctcccggcgaaccaggctggtcgttctggaccagtagagccaactgcacagctcttctcgccgcatcgcctgctgcccatcctttcctcgggatagtattttcgccggatcggtacacccggtttggatggccatccatccaaacgtgagaaatagtcgccatggcttgttcatctgtcatcccgagcaaccaacaaacaacagtggcagaagccaatttgaccagcaccacatggtcgattccatagacattgaacgcattccgcatttgataacatccctgtatctcgtatgccttgaccagcgcgacgagcagcgtctgcatcgtcaacggcggaccataatgaacccgtcgaccagacaagcttgcacgcgacagccagtccatgactgagagtatagctccgatattatctacaattcaatccatatcttagtctcacgagcacaatttccagccccatgtcttcaacaagccatacctgaaggatgtccccactccgcacctccaagcgcatcattatgatccaagtaccgaatcaggacacccagatcgaaagcccccttgtccggatcgacctgcaactccgttcctggaaccctgaatccatccggcacgactgtgccctcgatcacgggaccgagaagctttcggcattcggtgctcgtcgctgccgtctcgatggcgcagcccattgcgtctagcagggctgtccgtgcacatttccaaatcgcttcgtcgtcttggttgagggagtaatggtagacatagttcactatgtcgactatcggttggtcgtacgggcgagacatttatggatggatgcgtgttttagcggtgatctaatttgttacgattgagatttattggcattcgcaatattatatttcgtgtagggcacatgtagaagtcctcggtggatttcctagaatgatccggtcgtacacgtcggccttgttcaatgccaatatcgaatgtttatttgtcttagggttactcaaacgtatgtgacttggtttatcacggcgtagctattggctctactaggtgccgtcgcggtccacacttgtcagcaacctatagaatggaagggaacacacaattgctaataagtagtgtaattaaaaatctctaaattgcctttttccaactgccagtaccaaaaaccaaccctagtagttgaatagtcctatacatgacagattgaagacaaactagacaaactacctaagcattacggcgggatggacccgattaggcaaagtaagaagctagttccatggtttcaaagattctgagagaaccatctatcatcgctttcgttcattctactaccgctatcacctcacctcgatctgcgtgagctaagcatctacaacatgcagtcgggcctcgatatctgctctctagcggtatctcgattatggggaaggcgtcttccaccctcagagttccctaagctgaatacgctagccggtcttcctgtcgagctattgttatcaataaccgacttcctccctctggatggttgggtttgcatttcactctgcaatcgccgactcttcgccatattcaaccatcgaatcaattccgcccccttgttaggagttgacaaactgcctgttctactccgactggaacgagatctaccaccgaattactttacttgccacatttgccatattcttcataagtatgatgactatgatggctccgaatgcttcggtctatctggctcagtttacgacctagtgtactgtcctcttccatgcattaagaaatggaaagaagggcctgctaggttagagtttagattaagtgaaccaggaccgatcgggttccatgtgtatcatagggtattttttctgcatattcagcttgctatgaagagatgctgctatggagaaaagtatggaatcagcactgaagcgttatcttacacccaagttcgaacttactccgatgaaccagaattcacctctctcttttcgaccgacgcgcatatgcatccagagatactggggctttgtataagaacgcaacatatggtatttgttcactgcagcaaaccaaagctactactttctcgaccgaaaattacggatgcgaaagatccttctgagattatttatatttgcgcgcatgtttctcgtctaaggcgtgctgaactacttgacctagtggtgaacgcttatcttactggagagaaaggccctagttacacttttacgtgtgaaaaatgcaatacagtttgcttgattgaagtttgtgaatatggatctgatttggctctagtccttacaacgtggattaatcttgggcctgttctaaccccagatgaccctcgatggaagatctattgtaattcgccggatgcttctgaagtgactctcgatccaaatgatctgaaagatagtccacgggtcttgtttgaaaatgtgtcgcctcagtcgttagaggccttacggtcatgcaacctttcctatctgaagggccagcgatacaagaaggttatgagcctactgcattggcacaaaagcatatggtatctaccaagtaatgacttttggggaagtcattggaaatacggacgaacccacctcgctatcatatgctcatgtggttatttgtctgcttgcttccttttaacctgtcttattattgccatcgtacattattatggctaaacgagaatgttggttgtttacaatgttagcaaaatagacctattaaagtgacctctagttcgagtgggcaaatagaggctgaagacatctactaacagattgaaaagacaatgtccaaaagaatttaaaagacagcgtgcttgcctgaatctacttccctcgctcttgcctagtttcactccgaggccttccttcccataggcattctactactataacatcactttattatcatctttctatcgatcttttttagggtcttttagaatataaccgataacctcagcctttctttaccttctgtgaacttgattttgcaaaatcacattacgatcagattactctcacaatggcattgttccttgtacatcagattttcatttcattctaggcctcgacatttccgcgctccttttcgcggactggctcatcaacgcttgtgtccgtccagttacttgggtgcagctgagtgattttttcttttttatcatatctggtctctttctccgtgagtgagacctgctatcccaagctctaaggcaaattgtacggtgcttacctttgacacacacagttggtcttgagacttactgcttgcatcctcggttgccctgcttcttgcaaggaagtgcagatcaatatgtcacaaacactaagccgggaaaccaccggagtgttaggtgcccgttcgattcaaaagaattgagtgcattttcatcagaatgctaagtacagaaagggaaaagaatagggagaagaaaactatctacgagttccgctccctaggtttaggcgagctctttcagcaaaccacgcaaatggtgattctagcttatgttctaggaagagcgacttcctccataagtggaaagtgcatatggccgcggtacgttcagtgtccctaccctcagatcgtcccaggagaagcacacaatactaataaagtactagcccataatcagaattctcaatctcacaatggtactgctccttgttcagcaaatcttcacctttattctgggcgtcggaatctccgggctcctctttgcagcggcctggctggccatcgcctgtatccaatgcgtgccttggaacctggatgtcatagattataagccgggaaagcactggagaagcacacagtatcaataaaattttaggccaaccgtctgcagaacataaaactgcagatccccactggacttacggtgtctgtggagtaatctggggcgcacacagcctcatcatgcagcaaggaaattttggaccagcaaaaggaaggaggccatcgagataggagtataagctgggggcgaagtcactgccccccagtaagatgtcgctgtatttgggggggacaagttaaaactgatgcaagtatacagtctacgtgactgagaagaggagctactttaccaatgtataattttgtataggatatatggaagcaaaacaagagatattccgaaactccaataatatttatttagtagttatgtggctctacataaacaaataacctttaaaatccaccaacacctctcactcgctgtacagcgccaatggctcccctagcccaactgaacctccgcttttcaggccccattgagcccggcggagtctcgtcggtcttcgggtcatgccagcagccatccttggtacttgcagcgccgtatttggcagtattctggttacgatttatcaactccgtccaagcacgacaaacgagctcagaatcaataagcacgttgacttcctggctgtggaagaatgactgggtgtcgaggtttccattgcctagaaagatgattaaataaattaaattgtcgtaatgggatctgggacttaccttgaatcgcaatctgctcatcgacaatcatcaacttgatatgacagctgcgcttcttgaagctattatgaatcggacgagtctggtccttgccgacataatagcatatccgtagacgagacttctcttcgtcggtttcgagggacttgtacagcctgtttgaaatcatctcgttggtcccattttgaaatggaagtagctcgcctgcgtcattatagccaaggcatagatagcaggataccacgacaccccggcgaacggcgtccaggatgggttccagtagaggttcggcattcatatttggtgtctgaatgaggattgagcgctgggcgttgttgatcgcggaaagccacgccgcgttttgcggagtgtggacgctgctgtgatttggagcttgaagaaattgaaagttagagtcatacccggctgtctgagggagcttatctttgtgggtttgacttacatccatatggttccctgtttaccaatgccattgcgaagggctcgtgtcgtggtataaccaaataagggttgaacatatcatcctggtcgacttctggtgcatcgcctgttgtgtcaagctggatagttgtatctgttgagttgttagatattatcatagatagtgcacaggtaccacatactgagatgacggctaacagcctgggtgcgcgtttcgtcaccttgtgggtagacagagtcgttgactctccgggcctcttgttcaaagtcattatcataatgtggagagtcggtagtatgctcaggaagaactgtatcgccacgctctgtagaaataccgtcgtaccttcctacatggcatggtatcggagcatctttggctggggagttcagaagtggaaagggggggtcgagagcctttccccacgacagcaaagcagcatcatagaaagaatcaacaatcgggccctcgatatgagatagcatctcaaggttgtcgttgtcttgtatgttactgctctgtatgagagccatgcgccggtcaatcacggtaaactttgcatggaacgttccaacgacaggccggtggtagttgatgacttggagatcgacattggggatctcgctcgcggcaggtagcttcacctttccaccgacatactggtcctcgtggacactcagtctattctcccatgcctagtggtttattagaatcatatctaggtcgtgtgcgatatatatatcaaaagtaagagcactcacctgacgaggatctccgcgatcatacatcaacttcataatcactttctgtcccctttctcctgctcgtttggagagttcccggatggcattcgtcactaatgtcgatgcatccgagtgaatccagaaattggtacccagaaagacttcatgttcagcgcgcgcaatgcaattcgccaaatggcgacagagatcgggtagcggggcgacaatggtcagtggtagaactcctgtgctccccagcagccggggcgatacaacccctgacattgggttattttctaaacagcataaggcgtcatgataaacctggaaatatgtcagattgattcttcacataatgatagaggaaatttgttcacctttaaaaatagatcactcgtttccacagacccaaagttcccgcaagtgcgagctttctgcagctcatccaacgcttcccattctaactcattttcgacgtctgattgttccgcgcgatcgagtatatccgacgcgtcacggctctcgtacagattgtaaaagacatcttgcggcgattgcgacgagtcaagagccaactcccacgttactgtcggctcttgacacatattgtacaccttgcgtggtaccatcttgcaccgaactcgattggggctcggaggttgtcgaatgaataaaataatgccgacggtagaaaaggatacggtcgcagcagctagcttgagaaattcgacgcagttcaagagtgttccagtcaagttccacgggtggaaaataccatccatgactgggctgacgtagggttagccctgttctttccttcggggtttcttctttgtagagacacgcgtcggggacttcgatgcgaatggagtcgaacaacggtgatgcctagaatattttctcttagctccatgtccttctttccaaacttggaaggaccgttcagccctatgacgtctgtgctgtataccccacaaaagtaccgaggggatcttgacagccccggtatttctacgatatttctatatgctggaatattattgaccaagccagtagaatttgtatttattcttgaggagattaaagaatatacataaagctatttccaaaaggcgtgggagaaaaatcataccggtggctctccgatatatatgaaacatgaaacccctaagcttttctagtgcatctccttagttcgagatatctccgctctaaactctccctgttgcaagcccgcggcttcaggcacttcaatcccaaggtcaatatctcgcactccccaaacagagcgacggggtgtcttgatcccagtctgcaaatatagatctagttcatcgacataatcatatgcagccttgccagtaatggcgagcctctcataagagtcaagtccgcctaagcgccactcgggtaagggcttgcggcaatctcccaggtcatacacataaccagggcggcccttctcgtcaatcaccttccgacgggaaaacttgacgtcatgcccaatcggcgtgtagtccttgatctgctccgtcctaaatcccactactggatgaacaaactcaaatgtctctcctagtaggtttccctctttgtcaaaagaatcatagtttccaggccggcgcctctcagacccgttggcgtagtaaaatagcgtaaagctgtcttctagcgggcctgttccccagccatagctgcgtcgcttgttcacagaccggacaggagacgtggagggatgcttgagtttgaaagctgaagctattgctgcaaccttgcgttgggcccagccttccaaagactcgggggctggattttcgacaagcgttgaaatgtggcgttccctctcttctctttcctcggagatagtctcctcattgagcgacaggtggggtttgatccggtccagcatccaggagaaggtaatattagacatttcttccatgtcgccctcgtctttgagggtttcactcgaacccccgccgatgttgatgtgataaccggggaaccacacctgtgtcaatgttcgggggtggagctggtgcttgtggtcatcttccaactttaggagcacgcgggtctcctgattcaaggctgtggccatctcatttagctttcgggctgcgttgttgacatcctcgtcactagccctgccgctgctcttgatccggattgcgtcttgcaagagatcgttccattttttagctttctgatcgactattctcttctgagtttgtatctgctctgaagtgacgtttccaagtttatggagataccacagagtgggcgagaaggcattgcggtgttcatcgagcgccaaggcctgaaatgcatgtttgatatctggaaccgtctgtcactattgtgccccacaaaccaccttgaggcaagaaggaaagacagatcttaatatacttactaggtgaaagtccaacattttcccatccattcttatccgaccaccacaacagccacgatggcaatgtcatccccagtacctccggaattccaatagcgccgaccgtatcatagacgccaacaacttccacgtcccttgatccctcctgagcccagtcaccctcgggacgcttctcaaacacgaaagtctcaccccgagcgccctgattctcatcagcctttccatcaatccactcaaaccagaggtcactgcaatagaagcgctcgccgggtgtatttttcttatagacctcccagagatcgggaaaccgattcaaatccctcttacagcaaataccaatatccgagattaagcccgcaatagcccgggccgtgaacgcgcccctcgagaaaccaaaacacataatctgatctccgggtctgtagttcaggacacagaagttatacgcttcgacgacattcccttctaagccctggccaatggcgccttcgatcctttgtcccaaaggacctgaggtcgtgccgattccggagtcataccagactatttgctgccattgattcccgtgttcgtcggttccgacactgttcagggcgcggcagagacgcgtcacattagatgggacgtttttcttgcctgagacggcggactgccatgttccgtcgcagcagatgatgatgcgcttgcgcatggggtgagtctttgaatccctcctttgttgggctgtgcatgctggctcatgaatctcggaggatggaggcattgtgtatgtaaaacggagtctaatctggtataaagaggattaagcttagaaggtggcaatgacaccgtctatatagttttcgttttcacccttgtctatgttttgattggttttttcgcatggctaggtttcatctcgaggtcgctttgattatctgttttctctacctgcatgaagccccccgctactatacgaactccagcgccaccgtcagcagggttcgagtcacccgtacgggggactacagtaaaacctagttattgcggagcgaagcgaagcaagtataaaccagaagatcttactctgtacagtgactgttcataagttttaacaccccctaaagccccatatatataccgccttcctatacagtttacaccgccatattatggaggattgcggcagaacacaaggtaggggtacgtgtcacgtggcaaggttttttttcccaggggagctgaatatgacacaagcagggagttgatctagccgaggggtcgctgtgaagccaataagccagcaagagggctttgcgcagcattagaagttagaatcagaagagcgtggtcctcgtcatttcggatcgatgagccatcggaggacaggtggggaggtaggagggactcttcccgggcaagatcactcgtacaatcccgtcacgttattcgttgtatacagtcctaggtcgaaataatttcttgtcggagacctgggggtatgagagtgttatgaaatgcacggacctgcgctttggatgaggtgttgattgaatataattccgcagtctccactgccaactttgattccgcatggtatagtttacatatacaacatatttacaactagaaaaagcttgtcaatcagtcatcagtggtgcagtctcctgaaattagaaattcagagatctccagcgatgtagccatcgcaggcaaagattgcgagggcctggggcagactagcgcccgaaatcttcagttgtacatatatcgctatcacttgtgtgactgatgagatcttcattgcattcttagtgccccactagggtactggacacgttcgaaatgcatcaagctttcccaaaactccatgtaagcacttgctcggtatcggcatcaaaaaagccgatctaccttatcgtggcaagatcgccgctaattatattaccataagattgtccgtacttagctcggaagcatctatagagtcttgtgagaccacttcaggccattcccatagtctagtggaaatcgattcacaaagaggggaagaagcatagagcattgataagagaacagtgaagcaaatccaactgtgacgtgacaaaaccggcagaaatctttctcaatattagctgtggtctatacggagtactccgtacgaagacagaaaaataattttcaatatagaaagtagggggcctgacaggtaggcatcagaagcaccatcctgaggctatgctcgcgtaaagaatccttcacagtgatgtacatcgtatagaaacttgcgataatccctgtcgcaaagttgtgattgggcagatggccttttccagtgatgggggccgtgacgggaatattggcgcggaaaaaaacactggagtaccataagcacttgcgacgatccatgtaagaaggaaatatgctaatgcacataatccgtttccatggaggagcaagaaggggcggtacttgattgagaatccgaggatgtttaattggggcgtgtcgcaaatgtcatataaactagaggctcatcgtttgttctgctattgaattgacacccaagtatgaaagccagtaaactcaccagaccggatggcaaagtagcccggctgcgagcatcctgtgatgcttgcaacgaatccaaagtccgatgcagtcaagccaagccaacttgcgcccgctgcgagaagcagaacatcacttgcgcatatggattatcccgccgcagtcacaaagatgccccacgaattggaactcaacctacgacagtaccagaatcctccgaatcgaccggcgatgcgtcctcgcaatcagccgtgtgtcccccttctccttgccgggcaatagacaacgcaacacaatctacctccgagacgtctgatggaatatgcaacaaggacacctttgatatgatggctgacagcctgtcttccttccgaccaaatatgggactgtataatccacaagtattcgacgcgatcgacaacacattggatctacatacgggattccaccaagtggaagacatgctggatggctacgacttcctcgaccaatgcctcagcctacctgcacccgggcatacagcaaatgaggatccaaacaccgaactagaagctacaagttcccaaaggaacaatcatcaccactcaaccactgagagtcctagccatcataagtgtagctgcacatcccatctgatgaaacaattggtatctttaccgcttgcttttgagaatcaggcaaccttatcatttgatgtgcagctctcagaactgaaactagcagtcaacgtggcaaaagcctgtatgggttgcagttgcaccttgcatgatgatatggcgatgtgtaagatcccaacacgttccacccaagtcacatcgtcacgacgttgttcatagcagagaacaatagaccggaactcttacaaagcaccatactgacaaatcggtctatacctttctagtgatgatcagcattcttatcgggcgagtcattcaaggatttgagaaaaccctgtcaataatccagcccatggcaaatacagaaactttgaacgcgtcgagcggccccccgcaccgcggcggcnnnnnnnnnnnnnnnnnnnnnnnnnnnnnnnnnnnnnnnnnnnnnnnnnnnnnnnnnnnnnnnnnnnnnnnnnnnnnnnnnnnnnnnnnnnnnnnnnnnnnnnnnnnnnnnnnnnnnnnnnnnnnnnnnnnnnnnnnnnnnnnnnnnnnnnnnnnnnnnnnnnnnnnnnnnnnnnnnnnnnnnnnnnnnnnnnnnnnnnnnnnnnnnnnnnnnnnnnnnnngggcaggcccgggcacgcacctacactgtcgtgggggacgctccagatcgaggcagacgaagaagacgagctgaagcagcatatgtggctgctacagttcaagaaatttcgaccggttttaaaccagttcaatacatatatcggccgactgggaggtacttatggctttggtgattctgctcaggttaaagcctaccagtgcatacatatgtggttggcgcaaaagatggataacgtgaatcatcagtataaggcccaagaaaagtgtgaggggcaacttgataggttagatactgtcaatcaggtagcgcgatagagccggagaaagtgagatgaagggaagaagcctggtagtcagatggacacaagagactggacctatgttcatattagaggattcacataaaatgactatagacgcgtacatgaagatggcgattttcttgcgggcaggtttagtataaagcaggggcttctatggtgcattgatggctcatggatagatcctcggtatagaatcaatttgtgttgttatgatgtatggcatgcgtgagaatctaactgactactctttcaaatccgaaagtaaccctagcccctatgcccctgcgtatgctctcatgattttcccacttccaagctggtcatcgccaggtccctaagtgactcgagcgtgcaggacgagccgagcaacatgaccaacggcacatcggttgtcaagctctggtagaaccatgttcggaattcagccccaatcatactatccatgccgtattgcagcaaaggcttcttgacatccacaacctcgtacttcaaaaggacgaggttgccaaatcgccggcggatgtgatccagcacagcctcgtcgagggtgtgacctgattgcatcagggtcgtaacctcagcaggtaggcttccgttctgcgcttgcgatgactcatccgagccaccgtccaaggcgctggctaaaagattggcgcgtggatcgtccaaagctggatgggacccttcgaagcctctcttgcgcaattcctttagtccgaaggcttctagacccgtcagaagatgggaagcggctaattcatcgtgtgcgtgcgatattcccattgtagcgctggatgacaaggcaagatcaatgagctggaggagctcgtcggcgtcaatggcctgaatccctttgcgtaaaaggagggcctcaatttcgggattatcatgtagatagccgacttctgagatcatacccaagccaaccgcaacggccggatatccttggttgcgcaggaagcgagagaactggtcaaggaaatggtttgcggcacagtagttagactcggtcgcagtaccgacgctgccagagacggaggaagtcatcaggaagaaatcaagatgagagccccgtccgtgcatctgcaggctgttgtacaaattccaagatccttgtactttggggtcgatgccagtatgccagtattcgttgggcatgacagagaaaattgcttcattcagacccatggccgcctgcacaactccgccaatctcacccatggcggcagccgcagtgataacggcttcgacatcagacgcctcgcaaacgtcacctctgactacctcgcatctggcacctgatgcttcgaggtcttggaccaggtggcgtgcagctgccttgtcaataccggatcgacctaggaaggtaaatttccgggcacctcggttgaccatccaacgcgaaagagtgcgccccagaccgcccaagcagcctaccatcacatagctcttctcactgtcaaattgcgtggtgtgcctcaggggttggattgggatggtggactcagcccgttcaagattaatggccaccttgccgattctgctgcgcgatgagaagtaacggaatgcctgctcagtctcaccgatatcaaaaatattcagcggctcgaacgcggtgatggttccctgccggtagagtttcatgacctgggaaagaaggtcattccatagagagtgaagctgctcactatcggtgtggtagagatggctgagatcgaaggctgtgaaagtggtactttgtaggaattggtccatttctagacggccagcggtggtaaggtccatcttgccaatctccacaaaacgaccaaacgctgcacagcacctccacgtcgcgtgtagctgatcgcctgtcagagagttgagaatgacgtctacgccgcgcccagacgtagcactgaagataccctcgaggaaagaagtatcgcgagagctgaagatgttggatgctttgacgccaagtttatccaccaagaactttttcttctcatctgaagagacagtggtgaacaccttcacaatggttttgttagcatgcattccataaattgaacggtttcaattcgacttacctccgctcctgcatgtagagctaattggattgccgcgatgccaactccgccggctccggaatgaatcaagaccgtctccccagcctggatatgggcccggtagtgcaaggcatagatggcggtggcgtagactataggtaacgtagcgctaatgtcaaagctctccgcatcggtaagcttgtggcatgcccactgaggaagggtttgatatgtttggaaatggcttggtgccatggcaacgacacgatctccgggagcgaaatctgtcacaagagaccctacttgttcgactgtgccagcgcattccaactgacaggtggcgtcgggcgtgtcgactcgtccaaccaagacataatagtctttcgcattgagaccgaccgacgcgacccggatgcgcaaatcggtcgggccaatcgtttgtggagctttcagctgctggaaataaatagtgtccagctgcccagcttgctcgatggcgagtctcacgtctttggcatcgtgtaagctagactcggtcgtctcaagtccctgcttgttgcggaagagggtattaatgctgtcatcgggtgtgaaccgcgagacgtggaccacccccttgcgctgcgcaaattctaggtctggcttcttaccaggctgggtgagaagagataccagacgcttcgcggtcatatggatttgagtttcaggctcgtcaatatcataggtgtagagcttaagcgagggttgttctagcatcaatgctcgggccaggccagatacaagagcaaagtccggcctgtcaccatgcataatattaccattggtaacccacaccaataatgttgcgttgtctgtcatgaccttgacgcgggccatctcatcgtcagagatgacggatagaagaggagactttatctcacagaggttgaaaattgttgtcccgctcgagacatgtgcgggtgtgagctcatttagccggacgcgcatcacccattgtccttggatgggtttcagggtatccgccagtgcagatccgagcgcagttttctcacgctcaacgatgaggaatttgtgcctttgcagtgaaacttgttgcaattcctgcggcttgcgcgcaacgataagtgttgtaccatcctcggaaaggcggacgggaagacaatcgagaccacgcgaggcaaatgaattgcttgtcaatccggggcataaggccaaaatggatgcgtcgtcggccatcaagccgccaaaggtatccacggcccggtcgatatgttcgttcatcgccggaagtaggatgaggtcatactcatggtccagttcagtgggactggagcagcgctctccagtctcaaggtttaagagacctcccaagatagtgccatcatcagaaactgatgctgtgctatatgcggacaggcgcttgaagctcccctgtgcggatagaagtcccaatacagccagggtgatgtcttgcacatcatttccaatttccaaaatacggaggcggggatttttgtgcgccaaaaggtccagcatagcgcccatcttgaggagcgggccggacaccggtgaatgggcctcatcagcaaacttctggacatggtgctgcgcatcatccatggccatgagccccagtccataaatgtcaggcttccaaagtacccgaagaactggatggcgcttatcttctatgtctgcttgactggtggattggtacggggagagtcgaatatcatcgaattgagccacaatttgtccatcgctgtcaatcatttctataccagcatgagtgtatccgaatccaatccgtttgacgactgcatgcatttggcaagtctgattggaggaagtagaagtgtggacgattgccgatggcagcctcgtgggtatctgggcacgtaactccttaggtttgccattggtggctgcaaccacagctagttggatcatgccgtccaaagcgattgggtgcactggatataccgaaatggaatcgccacttgtcttcaatagaggcgctgtagcactagcgaacgactccgatttcatacgcggggtataaaattcggagatggtttggaaggttgggccatagttcaacccctgcctgatgaatttttcgtaccaagtccgcttggctgtggattcaagcgctccgcttggtggcttatattttgactgcagagccgcgttgcgtgggtgaatagcgatcgatccagatgcatgctgtaccgcagatccattgtggtagcttgatatagcaaagtcccaccaggtggctgatgtggctgcattggtaatgacagacttgtgcagagaagtgaagatctccgcgctggtcgagaattctgtgttcaaggtcaacgcgttcgtgatgttgacgttggagaattgaaatgtagggtccgtgcgcgccgcgtcggtggcctgcataacagcctccatcgccatcgccaaataccctgcaccagggaaaacgaccgtatcaccaagcttatggtccttaagccaggagacatcatccaccttgaggatattgcgaaagatcttgtcgcgggcatttccaccggtgagtaggctacccaggagttcatgatgcggatacttgcgctgcctgtattcaacactggcgcggcattcgttccagaggatgttctcgtagttgaagcgatacggtggaagatctgtgaccacgcggtacatagagcgcacagacttcaaccctgtctggaggccattgacctttgaccaattgatctcataccctttgagccacaggtttccagcaaagctcaggatgctttccatcgagtccacattacgcttgattggggcagcatatttgagttctgcgccggcttttgccaaggtttgcttgatcggcagttccagtgaagagtgagggccaagctcgataaaacagtgctccgtgagttcatgaatgcgttcaatcgcatgagcaaaccgcacctggctttctaggttgcttctccagtaacttgctgtgaatccagatgacttgagctcaccagtcaccgaagacatcacagaggcaccctggggctgtcgaatcgagggacccaaactagggagggcccgttccaacagggcctggtactcttctccaatggataccatgtggtgggagtgatacgcctgcccgcctgtcttcagcttgcgcgcgaaaatattcctctgttgcaaagtcgccaagaagatgtccaatgcattctcatcgcctgagacggtgaccccctccggagagttgacgcaagccactcggatctggtcatccagtcctgctttcgcaatttcgtccgtggtggagctttcagacaagccgatagccatcatagcaccgacacgagtagattttgagacgcagtatccacgatagtaggcaattacgattgcctcggctgcagagacatgacctgcggcgaaggcagctgcgatttcacccgaagagtggccgactgtcatcgtaggggcaatttcccaagaagacagaagtcgaatgagggcaacttgtatcgcagtacagcatggttgagatcgctgtggtagatggatgaggcttgggttatcaacatccaagatcgcctccatcagtgaccaactggggggccctgggaggctcttgaggactgagtccatctccgtgatggtatcccggaaaagagaaaattccgagaggagctcacgacacatgccgggccactgagacccctgtccggtgaaaacaaacgcaaatggagtagatgcaacacctgtgactgggctggctgatgttacccaggtgcgtgtctggaaactatgagagatttcctgtgaccgcggagcaagtaaaaaccctctctcggcaaagtgagttcgcctggagcccaatgtatacgcaaggtctgcaatatctgtgtcaccaaattcatatcgtgcaaagtccgctacgcgggcttcgagggaggcggttgaggcagcggatagaggtaggatcactgtggactgggtgatgggcagttgtctgagctgccgagatgaactcaaagtcttggtaggctgctctaggataacatgacagttcgcaccgccgtaaccaaaagagttaataccttgagtgatgaattagctgattggtcttcttgtctgtcgaacacgccgtactaaccaacacgccgcactcgagacgagtggtttggccaattcgtcaactcagttggaattttgatattcctgtcctcaaccttcaactttggattgatgttttttaagccatgagtgggtggaatttggccgcgttcaagggcaagggtagacttgatcacgcttgaaattccgctcgctgcttcagaatgtccgacattacttttcaccgacccgatcatgagggggttatttggcgtgcgttgaaacacccgcgataatgcctcaacctcgatggcatcgccgactttggtcccggtgccatgacactcgacaaacgtaatgtcgtccggaacgattccacccttggccatggccttttggattaccgcctcctgaccatcggcgctgggtaaactgattccagatgtcttgccattcctggatacaatcgcatttcagcacaaagccaggagttggggagaaaaaaaaagcttcacttacgcgttgaccgctgacccacgtatcagactccggattgggtcaccatctcgcagggcatcttcgagcctcttgacatacaaggccccaatgccatccgcacgaccatagccgtcggcagaagtgtcaaatgtgtggcacgctgatgttccggagaggaccccagctttcattgtagcaatatgttgctcggcggactgaatcaggttcgcgccggcaacaatggcggcgtcacattcgcgattctgcagggctgtacatgccatgtgaagacagtagagtgatgaggagcaggctgtgtcaagaagaagactgaatagaagcgaccaaaggtgagaaatcataaattccagtggatatgttgcaatttacgacttacctaggtcctagaagattgaagacatggctgatgcggtttgccaagattgtagtgcctagacccgttccagagtaacggctcagactacactggttagctatgagacctaacaacggacccatgaaaaggacaatatgtacttactagtcagggtcttttagctgcatcaccatgtagtcaacagtgaaatttcccacataacatcctgtatttgacccagatgcttgatccagaggtattcctgcattttccatgcattcgtatacaacttcaagcatctttcgttgttgagggtccatatacttcgcttcgaggttgttgatcccaaagaaactgttctcaaactctcgcacgtcatcatcaagaaaataaccgccttctgtgatcatacttccggggcgatccatgccctgggggtgatagaagccgtcgacattgaaacgcgatttggggaccttgcattgggccgatctaccattggaaatcagatcccaaaattcacgagggcttgaaacttcccctggtaggcgacaggctgatgggagataaatattattacaattcacaaagacaatcaagaagcatgccttaccaattccgcagatggcaatggcctcaccaaggccttcatccgcaggtgatgaatctagtaaaataggcgacatgatgaggttcacgcggggcaaataaatttgagcagccaatattgtttcgaaaaagaagtaatagttcctatttggaacttattgagcgtctcttgatcatatacatatgtatatgtttaccttgaggctaagacccgccatatctggtctcattgtgctcattgaaagcgatcgccgacaaaacacctgcatttacagatatcggaattctctggaattgcatgatgaccccggtaaacttggggttaccgtgtattttgccgagaaatatgaagctttcggccatctgggaatcgaagaacgggcttcgcggctcgggcacatgcagtcaccgacgagtctctacgccggacattcaatctccggagtagcccaatcgcattttcttggggaaattttgctctggctatagattctagataacaaggggccagttactctgcttgttgagagatttctattcccgtgatcttgacagtgcatcagaactagcgacctttccagccactagaataggattttattcttcagatatgattaccaaggcacatactcgtccttcggtcctgataactgggtaaaagcagactggatcctgtttacaggttgaaatgctcatgatggaggtagttgcggcgaggggggaatcggacatgctttggcacttgacttcaagaatcaaggtatgttacatagaaaatttgtattaacaagttctgatcgttcaatgtttaggatacgtggtcttcaccactcttctcgcccatgagccacgggaccatttgaccgatctcggaatacactcgttcactgcggatgttacgaaggacagtgacattgagcagttgaaggaggccatttcaagcttgacagaaggcagtctgagtgtgcttgttaataatgcgtaagtaatatatgtctatttttcgttggctgatctaacgatggcttcaaacttggatagagggatatgtgagtgacgaagagccaaaagaggtgataaatgggctaaaccaagcaggctatacgatgaccgcaatcgatacagatgtgaaagaggtagagaagatgtttggtgtcaatgttttcggaccgatgcgaatggtccacatcttccaccctctacttatcaaagccagggggaagattgtcaacattggcagcgtgggcggtattgttccttatgtttatggatgcaagttgacttttgatcgcctgaactgtgctcgagataggagctgaccgactttgaagctagctacaatgcaacaaaggccgctctccaccactggggcaacaccttaagagtcgagatgaagccgctcgggtaagcctctctactagaagatagtcacccgcgctgacttcaataaatgaagtgttgaagtggtcaatgttatctccggagaagtgggcacgaacattttgaaacgggatcacaatcgcaaactaccagaggactcgttttaccgcccgctcgagaaagagtttatgaaccatgtcacaagaacacctcgtgagcatttatctatttagctttgtgagcgaattgcatagtactaacgcttgatacaggcacgactacaccggcggagtattcccggtccgtcgtcattgaagtgatgaagcaacactcgactgcttggttctggacaggagccagctcggggattgtaagatttagcgagcagttctttcctcgtacgctttgggtaaactctctataattccgtttggctgaacaccagcggtacaatggctaacatcctgtctctaggactggatattcactcgacaattcaacttgaacaagcttcgaatgtgagaattgagccaagtgactacatcatagaaagcgcacacttaaactagcttcatagaaatctttcgagatctacgaaattcacccagaaaagattcatcccatcacactggtaatagtctagttgtataaatttgattgctgaatgaaccgttccacattcggaagtttgattcaaaaagaacagcgacaaggctagactttcacttaactcatgccttggtatttcctcatttggcaatcatctcacgttcatgtcgtcactagcatctcaatcagtgcagatccatgtgatacccaaactttgaagttattataagtgtcacgaggatacaaaacctgtgatacgagggatgcatgtaactaggaaactaaagataggaaggaagaagaaagaaatagaatgatacggcgagcccacttataatatagatcgaccaatcatatcaacaaaaaccatcgtcaatgcaaacaaaataaacaccacgagcttgttgctcgtgacataccggttttatgatatatccagtcttgcagaccattgctttcatccagctaggtaatttgcatatgtaacgctttattagaggtatttaagggaacttatgaaagtggcaaagaatatgtatttgagaaatgaaaaggtcattagaaaggttattgaacgatatattgttcttctgtgtactgaaaaggtaagccgatataggactataaaatgatttcccttcgctctagcaagtatggattttacatgactgctgcagaaagatggcttcacttgcggtgatcactgcttcacatccgcgtagtccttttccaaaatccccaagtgctcagtaatctcttccccattcaccttcgtcggagtcacatcgagcaggacaaataacatgcgtcccggtcggttttcgtctaagttcttccacatatgcatacagcctcggttcacacctaattgggtcagccacaaaatactattggaatttatcgaaagcgtaagcaaagacttactcatatcaccaggcaacatcaacttcttctcgccactgtcaagtgtgagctcaaaagctccctccaccacgatgccgtaatcaattgataaggcacggtgaatgggcgattccacgcctgggccaaagtcaatcaaacgaacaacacttccgtttgagacatgaatggggggctaagagggacaaagccaagtgttagcagacgcgatccataatcagacaaataggttgatttgcccagcaaaccttcgtacctcattgtcgcgtgcataaaccaggtcattatcatcattcatgtccactggattcccagaggtgctgtaaatgatgtttgcgaccgccagcccatccaccatgatccggtggtggtctccatcatcgtcaacagcaaatacgcctttgccttccttgttgtgggttgtaatgaacctgcgcgcatggcgaaggccttcggccggaaacttggtaataggtcccttaggagcggacatggcaattttcccaaagtaaagtagtaagatatcttgtctttcgttatgaaaggttagagataattgccacgaaaaagaaatatcttctctatgtataacaaacctgagagcgtctctgctcatgggaattgtcggaacaccgacgtatatcgaataccatacgccctcctgtcttcaaatcaccggtaattatcaatataggaagtctattactagcgcagatatcggaaaactcgggcaagttatcaaaccccgtgacgaattggccctttccgagtcatcattagcaggagcttcgggaatacctaggtgcgagatcgggaattcagaaggtgtggcattttgaaaaaatataccgaatgccaacctacagaatcaagcaatctagtaattccaggatatacatgattaggaggggttcatcatcatcatatactaaaaaaaggacttcaagttaaaaatctggatcaagtacattacattatggtacaggactgaggagtagaccaattccaggtcgcttctgctctaaaatttccatcagttcttcccatagcttctccatcgccaatatgccttcttgacttcttacgaatggagacaatgctgatctgatgataaaaggcatgggtcagccacggcttgaaaattgtatgaagagagatattctcggaagggttcatactcatcaatatggccgtcatttaggtactttccatgacttttgtccccttgcgcaatagctgcgaccaatgtgcgacctccaacttctgtcgtccgagcggtggccttgctcagaagccagagcgcgaaccctgtgatcccgtgcacattctcgatgagaccagaagtgcagtagccaggtgtgaatgaattgacaattatattgccggtgccgttaggagggtttgaatcaagttgttttgccatcgccctcgcaagtagtatctccaacaatttggagatgggatacctgagaatgttacatcagttcttttcggccttgtttgcaatgtgtaaaagacaatagattgaactcacctttcatgcatcctggcttgctgtcgatcattcaaaacttggaaggtgttttgtgttttccactctgggagatcatacattacgtgcctgtcggatgccacgaaactgatgcagggctgaatcacccatgttttggatgagcgtctgagtgctggaagaagcagtatagccagcaaaaacgtattaatcacgttcacggtcaacgtgctttcatgattgtcggcccaaacaaagtcatgggtgtagatacctgcatttagcagaacggcgtctattcgacacatttccattcgggtagcaaattcctgcactgactcttgattggccatatccagttcctcgacttggatgactccagatcgccccgtcaactgttcgagtgtatccgcggctatctggcctttctcagctgaccgtgcagctaatatgagtcgactcacattcaatctcaacaaatgacgggcagcctcaaaaccgatgcccctgttagatccagtgatgataacagtttggccttggaagtcatgcgtgggaactggcggctcgacgaagagctgagagtagaggaacgaaagcgccgacatacttgcggtggagatttctggcagcgtagaaggtgatttacccaagtcatcggggaaattagtcgacagggttgtaatcccagtggcataaacatagagatccccgcttccccgagtgatcctaacaggtcggtcattacgcatttgccgagacgcaagagagaagggaaaacttggatctattcccgttctggtctgtcaatgtgcccatatccttctgtaatttgtgatttgaagccgcgtttggaggggcccaccacatggtgcagtagaatctacacagctataatgagtgatatcactgctgctttcgcatgttttagccatcaagtgtaaacatggcagcaattttattcttgggacctttagttctcatcctagccgtatggctatcgagctgggtcttttcgccaaaacagcgcttgcctcccggtaggagaaaatttgggctcaacctatactttgaactcttcattaagatcatcttgcaggacctcagacactccctttcattggaaatattcaccaatttcccagggcgggtatccacttgcggtacttaggactgctcaaccctcactttcttgcattgtcgctaatgagaactcccacagattcaccgactgggcgaagcaatatggtcccgtctttccactcaggattggttcgcatggtctcatggtggttttgacttctgcgtaccatgcaacacatctcctagataagcgctcagccaactcgagcaatcggccgccatcctttgtgctgggcgacctggtctttgctggtgaccatcctatgtttatggatgcgaacgagcggtggaaactcagacgaaagctttactttcagctaatgaatgaggcgcggtgtaacacggagcatatacgtctcgtcgaggcagaagccacacatttgctacgcgacttgtgcctcgagccggattcgtttatgcagcatcctgctagatacagcaacagcattatcatgagtttgggtaagtgtaattctcatggaacaagatcagctgctaatttcggatgatgttagtgtttggcattcgcacacctcactactctagcccccactgcattgagctgcaacgcatagtaacagaattgagcaatttgggcgagattggtgccagcccaccggtagattggctgccgtttctcaaatatctcccggagcgactctggggtgattggaagacacgagccgctcgacttcgtcaacgagtcctgaacctccattcccctcttgtggatcgggtactggaacgccgcaagaatattggtactgctgcgactttccttgatggagttcttgatcggcaggagaagctgcaactcaccagagaagaaatagatatcatgtgtggcaacttactcgaaggtgggacagacaccatggctacgacaatactcaccttctttcaagccatggtcacgtaccctgaagttcaggccagagctcaaaagcagatcgatagtgttctcaccgatggagagtgtccatcctggagtgactatgatcggctaccctatgtggcgatgattgtcaaggaagtcttgcgttggcgacctccagctccaggatcattcccccatactctagctcaaggtatgctgaaacttaccctatgatcgagaatgaaacagagcaatacgctcatatgttgatatagatgacgaatttgaagggatgaaattcctcaaggggacatccgtggtgctcaacgtctggggtattcacaatgatgagtcccgctacccaagccccgagactttcgaaccgtctcgatttgccgagcaaacccgactcgcttcagtttatgccaatgctggtgatgcacaaaagcgtgatcattttggctatggagcaggtcgacggatctgtcctggcattcatttggctgaacgcgcgcttttcatagctatggctaagcttctatggggatttactgttcaacagaagttggatagttccggcaatcctattcctgttgatgtcaacccggccacagcataccgcgatgggttcttaaatcagtgtctgcctttcgatattgacatcaagccccgactggggagacaagagatgatcatggtcgccgcggcaaaggcagaaaatgatgttctcagcgcctatgaatagtcttaaactagttaaaccacgaatttgaaggagacgacagttcacccaccctacatgccattttttttacccaaccggtggcctacccaaatcacgtgactggtagcctatcttatcttcactggttgggtcaacttctgtaatttggtttttaaacctcaccaataccttaacaataccagctttccaccaatcatttctcgtcaatacctccacttgaggcgaatcagggagggataacaccttaataagaccgtaatagtatgttattctatacattcatagaacatatagtatgtctgttgtataataacacctcaataagaccttgatgtaattagtcaactaggcccccagtaactgactagtaatgatttaattaatgtgcgcaatctcaagaccattaaataatcactgataagctcacccaaacggtggatatctcacgtgatttgggtgggccaccggttgggtgaactgccccggtcgcgatgcaccttcgttgtatagcttctataaaactctgagactaacgatataccgttgagaacagcattttatcaacctaaagatgtggaattgctagtaatgtacccggctcagagagatacatgatcatttcaacaagtttgcacttgcagcgttgttccaccgtctacaacccaaccgacaccagttacatagctcgatctggggctagtcataaataagaccacgtctgcaatctcttccggctcggcaatacgtgacatgggaataattgttcgcatcatctcagggagatccgggtttccattaatggctgcagtcaccataggtgtattgacccagcctgggcaaatcgcattgacacgtatctcatgcggtgctagatcgagggctgcaaagcaagaaaatataagcctggattttggagtttattcgaattccgacataccggcactcttggtcaaccccataacagcatgcttcgtcgtcgtatatgggacaatatctggcgtcgcgatatacgaattgcatgatcccacgttcaaaatgacgcctcggccaacttggcgtgatttcccctgtttgttcaaggtgctgacactctgtgatttcataaccttggtcacggacttgatacagttgagtgttcccaacacgttgacctgccagaaggcgttcatctcagaaacctccgccttatagacgggcttgtgatgtttgaccccgatcccagcgctgttcacactataatcaatgcggtcaaatgcctgaactgctgccgtgaccatacggtcgacacttttctcgtcggtcacatcaacagccacgggaagtgcccggtaggtggggctagtagctattgattcactctctcgtgccgtctggagtgcagcctcgaggttcaaatcggctataaccacaccccgggcgccttcggcggcataggcgagggcgactgctttaccaataccactgcctagaaacgtcagaaccggtactacgaaagcctccgaacagcatcctaccagcaccagtcaccactgcaaccccattgagttgtagggccatgtttatttcgctgcgatcaaactttgaaaacggctcgagtgaacgaataccttgacgcctggaacatggatgaatctcttgttttattattgttcttcatcgacaaagtaataaagtgtacaaggaacactgattgtcaaccttggcgatcgctctgcgtggatcgattgaatcgccgacgtccccgacgttcccgacatccccgagatgagattgggattagatcacagaagtttcccgatcacggatgcccctgcattaagtccggtggaattaaacatcagtttcgctttcttatgtccgatcggtagttgttgcaggcggaacgagcgtgaccagcaatggggccaagaactacgcattgaatgaaacgggctctttggcagacttcgcaacattttgcataatccaagatttatttatactacgtatcaagcagtcttgtagaacggtcgaaaattatatctagttttcatcgcagacgtagtctatgagcaattttgttgggcggttttcagctgaacgtgtaatgatctccagatattcgtagatggggaaatcactatggatcccagtttcatataggtcccattctcactctccgatatgaatttaacagaaccttgatgtgtgccttgccactcacctttcagctttcggggcgcccctttttaacgcagtaagatcgtctttctgactgcatagttcatagcctaagaataccaagagatctaagtgcatattgcgtaaaagccaagttagccagcagagcattttaggaacaggcaaccatttggtcgatctctgaatcacaagtttcctcttcctttgcttcctcttggtatggaatgtacttcagcgccattcacttactctacaccagggggcagtgcgctagcgcggcttacatctcctgttgtacgtacctctaaggctgaatcacactacattttgttggatttgggggccaatctaccagtctgagcctcgttctgtcgatgtggaaatgaatttcccatgttcccgatctccgtcggtaacttacagggcaaaaaataacatctggatttttatataaaggttgataattgttcacttgaacaagtccaggttcttccatatcacccatctcactgtatactcaacaggatggtgcaaatatcgaatgtttggggctttggtctcgccattatggcgtctctggcagctgctgcaccaaaagactgtccagacggactctgcctgagaacacgggccaatctcagtccactagaagtcagtcaagaacttggtccgctgatttccaacgcctcaagtatcttcggacctagcgattcacgttgggcaaatgccacggcgagatatcaacagtatgccgcgcccaaatttacagtggtggtgcgggttgctcgcgaatctgacgtttcagtcattgtacgtctccttttccggaccctcaaatccaaatctaacgcccgagaagatcaaatatgccaatcgcaacagtcttccattctacgcagttaatcggggccatggtcttcctatttcccaggccaaattcagtggcttggagatcgatatgcaacttcttactggaattactatacagtctaacggaaagtccgctcttttccaaggaggaacgtacgatcaacaagtcatggacacgctatgggaggaaggctacgttacaagtaagtaaaactcgaacaaaaaacacccctactcaaatcaaccaagggaatacctaacattgaatctggaactcagctactggtagttgcggttgcgtgggaatgcttggcccagctctaggtggcggacatggacgtcagcaaggcttccatggcttgattagcgacaacattctcaagctcaatgttgtcttggctgatggaacaactgcgactgtttctaacacctctcatacggatctcttctgggcaatgaagggtgcgggccataattttggagtggtgacaagctttgaaatgagcatctacccaacccaagttcattcatggtattacaagaattatgtcttcacgcaggacaaattagaggacctcttcgaacagctgaatgtattgcagggcaatggaacccagccagtgaagatggccgctcaatatggcatttacatgatggactctactgtcagtgccaccgaggttagtattttccgatagatatccgagtgaagttttgctgataatttaatcacaaaacaaacaggcaatcatctggtggacttttggctacgccggctcgcaaagcgaggcacaacagtacctgacgccgtttgatgacctcaatccactcagttctactgacggaaatgttccattccctgaagttcccaacgtccaggggactgggatcaacaatgccacttgtgataagggtcttgaacggatagtcggtcccgctgggcttcaggtgtataacgccacagcgcaacgccagatctacgatcttttcaacagaaatgtcaagtcctacccagaactcgccgcttcagctgttgtgatggagggctactctgtggaggcggttcgaaaagtggactcggattcatccgcctatcctatgcgagatgattacttgctcatgtaagtctcagcctttgtccgggtggtttgacaattgcaagcgaaaggaaatatactaatagttctttgtttccataggcaaactaccgtctcctattccccaaattcgacactcgataatgttgccatagattgggttaccgagaaccaaaagttttggaacgagggccagccaacacgaaagcccactgcgtacgtcaattacgcatctggcagagaatcattagaagccatgtatggatatgaaccttggcgtttggagaggcttcggaaactcaaggccaagtatgatcctgagggccgattttcctactacaacccaatcgtctgataaaccaactgttcgtggatgacacgcgcacagtgcaaatttgtctccatccagcctttgatctgttatattgatacaaatcaggggggggctgagatttttccctttctctcgttctcaatacaatgttctatcttgttttaatcatttcagataagctcttcctcatagccctgccgtggtcgcgaaattagaaggcaataaatattgttctactatttagttcaacagttctagacataaatgaaacaaagagattggctttgaggtatcgtaaaaatgctggcaagactgacaagaccaactggcaaactttcatcaaccagtcgctctaccgatgcagtcatcaaggctatagccattgaaactatgatgcgagccaggactctacgcagatcaaccagaaactaaagctagagagagaagaagaagaagggaagagagatagagacgcccaagccccacctctagaaacaatcagccaatcagatccttagcaaacaatatgatgctacagttcgtaatgatgcaaacaaggcaaacaactagcaaacatcacatattgtgacgacctccctggtttacatttcttctgcactctccacgtatatcgttacatctttccatgatctactgcgtcgagtatatctcctggaaaaaaaaatttttatcgaagctaacctatataattagtaagatacttaattgtgccacagtatgatgaggaagacccttcagcactcaggggtagttgagaaatgataggaaatcaattatgaccatattaacatagaactaatgattcttcgtctgctctgcctatcaatgactatcgctccgtcttcgggtggaccgggtggtgtgtgctttatgcttcagaaagcgggcgggatcaaatgcctccgggccaatataggacgtaacgtccaagtggctcttcttgaacagacaactaacgtatgtctgcatgccctttccatcttctagtttgcgatgctcggtgagatctgcaagcatgtccaggtatctctggctatattcaccccttccgcgagatgtcatccagtcagcgatgccttttgcaagggcaccatcgtccggtccatagcgacgaacaggagtataaaatttgatatccggcactgttgctccaggagcaatatcgaaatagtataaatacccagaaagcaaaagatcaatctcaacgaagttatctttagcggctgggttgtactctgatatgcaagggacctcagaatcctcagggaagtccgagtctaggcctgtaacagctgcaatgagactgcggagctcctggagctgcgattcagggacggggatgcgccctcccattgtcatgacctgccgcacagaggcaaagctggtatggggagattggaagtagaacttgagcctcgatttttcagggacgacattatcaacagccagcatgctaagaattctcgttagcaatattccaaacgaggaagcatctattattgagatgcaaagataaaggcttacaaggggctcagcaattttccttccgggtcattgttgagaaattcgtgcattgcggctcgagattcactgttcggatcaagctgcttgagtgattcttcccacagagcgatgggcaacttcccatccgattgacccagacgacggggaacaaaatacgttttgagattcagaccattcttgagccactccgcggcgactaccaccgtagtggtgaagtgcgcacctgccgccgcttccttggcatatttggagcggtcatgatcgtagagggtggcgaagaaatggttggtccaggtaaggtccacagttggcacgaaatctgctatgcgatgcagcatctcaagtgtggcttgctggttcagaggatccaaaagggttcctgtgaaggagccaattgcctctgtggtgtagcggacatcgggcttgcctgccgcagtattccatttccaagaatattcaatcggagacccttcaactcccagcaaagatttccatttgaggttgccgtctggtccaggtgcggggcccatgtagggaacctatgctagccactccgttagtgttgctgcgtttctagtgaaacatggagaggaagagtgggggaaaaggaacagggatgcgcacgatccaatgatagtggaagagaagtgccacatattgctggtctgttgagtatccagcagcctcgaccatgttagacagatgctggcctgtcagtctccaccaataatctgcatcaggccctcgtgagggcagccatggtgatagagttgcccatgccttggtgggtggtcttgtcacttcaaccatgattcgattcaaacaaatgccaattcaatgattgatgagattagcaaagtagtaattatggagtttaatgagaagggatgtattccaaatatatccatcgtggagatatgttgttatcctttcgggcttcatggacctcgccctggctgcaacgaggtagattggtacatcgaaaaccacagcagcgaaccacctaggcaatgtttcgggaaatcgggaatctagccctcaactcgtcgggtatatataaccggggttaccacccgtagccgtggacgacttcgggcactaacttgccagcttgcagggatcatgacttggaaattgtaaatccgattaagtccgaagtgggatacatcctaaactccgttaagaccatttctttccttatgatatagtataattgcttcgtttcgctccgcaattaattgaccatccattgtcttcccaccaacatcgacattacaacatctttcatcccttcaaatacaaactttcctacaatggccgccgtcactaaacccttggttctgatcaccggtgcaaaccagggcctgggattcgcgacagcacaacagcttgctagcactggccaatataatcttcttgttgccgcccgctcccaggaaaaagccgaaggcgcagtcaagcaactggagtctagcaccaatagctctttgacgcctattgttatcgatcttgaccaagacgaatctatcactgcggcagccaagttcgttgaagagcgtttcggatcgctggatatcctcatcaacaacgctggtatcaatagatcgtccgacccaaatgctactctgcgcgagagctaccgagctgtgtttgaaacaaatgttttcggtgtggcggtgatgacagcaactttcctaccactcctacgcgcatcgaagtaccatgaccgacgtattgtcaatgtgacaagcggccttggtcaaattggcatcgcgtactcgccaacttcagaatacagtgctaagatatgggaactgcctatctaccgcagtagcaagtctgcgatcaatatgattagtgctgtcgatgctgtcagtctcgagaaagagaacattctcgttgttctagctgccccaggcttctgtcgtaccaactttggaggtggtcagggcgtcaaatcagcagaggagggggctcggcctattgtacgggctgctacagagggttcgccaaaagaactatttggaaagcttgtggacgacgagaacacgctggtcgagttcggctggtagattgaactgttatgaggattgggagtgacgagactagcaatatatttatgagatgttggcaggaatttgttgagataggtgtgtggggctgcctggttactcaggtcatctacaaaccgccgctcgtttacacgcagatctcgagatacttttcggactttgtcttttacagaatgaaaacccctttactctctctgatattgtgtttctgtgtcattcctcgagcaaatgatacctctcgttaaactataccagtacctctcaggtgagaggatggagaattcgccacctccgttgcccttttcgcgagatgagcagtttatgttcggtagtaatgaatcatgaaacggccgtgaatatccaaactgtgtgtaaaattctattgatgtaaccaaaaatttcggaaaatatacaaagtgaaagtgatgaagcagtaacgtgggactcaatgacctgggcgtcagttttccatgggattttcccactcgagattcgaacaaattgctttgagatccttcaaaagttcagagctattcaaatccaagcactccacaaagttattcggaaagcaatcgttagggccaattgccgagtgcccgatgccttcgtgtagtaatcaccgggttcccgaattgagaggagaatctcgtgacaattcaaatcattatactcttaccttgatgctagtcctagatagagtattggtctggcaaaacttgccctgtaaaagttttccaactcttgaacagccagttcgggcccttcttgccaataccttgccctccgcacatattcgccatgttgcactctcctcctccctttgctgatgggcttcgccccctcaaagtcatcattataggaggtgggattgctggtctatctttggcgaatgcctttgaaaaagcccctgtcccgatcgaatacgtaattctggaagctcgagacaccattgcaccacaggtcggagctggtattgctcttgccccaagcgggtgtcgaattctcgaccaattgggtgtgtatgacgatttggaacagctagttcatccggtgcaaagcagcggtgtgtgtgatggacagggaaagtcgttattgcccgagcggagtgacaccgcattgctcgtcactgcccgcatgtcatatccgttgggttgggtcgagcgtcgaagtgtcttgcaagtgctgtttaagcacatctgtcacaagaaaagtgtgttgacgagcaagaggatggatcggatcgaacactcccgtgagcaagagaagcctatcaaggtcatctgcaccgatggctctttctatgaaggcgatctggtcgtgggagccgatggagttcacagtaaaacgcgctcggagatgtggagggtggttgagcaaaatatctgtgatgattttgatgtgcagcaggaacgtcgtggtaagtggccctgaatcgtcgaaattattacccatcaatttgtacggatgtactaacagggataacagccatgatggctgaatatcagtgcatgtttggtatctctagccccattccggggttggacgctggtatgaccgacgacacgcttgcaagagacgtgtccatggtagtggccagtggcaaggacggcaagattttttggtttttgttcaaacgtatgccacaagtataccacagccatgagattccgcgattcgatagcgcggatgcgttaaaatttgcagagcaatattttgatttccctgtccagtccggtgcgagcaacattaagttttctgatctgtgggagcggcgcgagacggcaacactagtccctctcgaggaggcagacttcgcgcattggacagctggtcgcattgtttgcttgggcgacagtgctcacaaaatgacaccccatactgggaccggaggcatgcttgctctcgaacatgcagcagtgttggccaacataatatgccggttggtggcccagggaaacaaattaccgctcacaacatctcaaatcggaacggccctgagtcaatacgatgaaaaaagacgacaccgtcgcacctccgctaaaataaagtctaccggagcgtctgctcgcatgcagactttacagagtcttgcggatcggcttgttgttcgtttccttttaccttacgctggtgatattcgtgccgatcaattttgcgatgatgccattggcgcagagcatattgaatacatgccagttccagcacgctctatgacgggcttgatgccttttaatcccaatcgtggtatcggtatgcatgaaagcatatggccacgcgtgttgtgggccttgccactacttgggatggcagttgctgggttgttgactatgttctccgtggcgccatttgaagatgcatacgacttccttgctcgtcgtcgctaccgcgaagtggaaatccgagacaaattctaccactctggtttgctcgatgatttctccaggtcgggagtcctgcgcttcatagtcagtgaagcgcacttcttttatcagcctttctccttttttgccgactatggtgtttggtatggtatcatgttggttgagtctgcaaggagagctaaccgactcaacgtcctaagtttgtaagtttgcgacagagtgaccaacactctggatgagaccttctaacatactatttcaccagtgctcttctctggggaatgctcaatatgtggggaatcgccattttcgttcccatttactactttgcttactacatcctcacgccaatttccacctttgacgcatccgacaggcgtctaacaaatctttcctatacaaagactatcctgccagtgcttttggctacccactatgccacttttatggacgcttatctttctccggtgcggtcccaccgtcaggctgctggcttcttgtgggagctattccctgtctggctctctcttgcacaggcgggccttgctcgaaaattcctccaaccgagcacgctgaagcaagatcgactcaataatgtcacacgcgacctaccgactatccgaacaaccattctcgggctttgtgccgtttcgactgcagtttggcagtatacagtctggtgcagcgaggactcgcttgtaaacatcttcatacccatccttagtagtgcgcagggccaaacctttgaacagctctttgccgagttcttgaaatgggatcaagtattcttcgctattccgaatttgttttggattatactattgtttgctgatcttcgtgccgctggcttgattcatgctggttggctcaaaatatcattctcggctctgggtctgataattgcgggtgggaatgggacgatgctaggattgatgtggctgtatagggaagaggttctggctacgagacgagatcgaggtgctgttgtgcgtcccatagcctgacctatggtgaatgcagtgtagagtttgacagcggagtgttaggagaaatgacaagacagaacttagcaggcgttgtcaatgctatccgaagaaataagctgcataagctcattatccttcgcaattagcaacatatccccagtctgtttactaatccagcgataaaagtgaaactagtatgccttgtgtcggtattggtgataatgcgcggtgcgccagaatctgcgatgagacctgccacaatagggccgaacccgcatgcgtatgtgttcgggtagccacatcaacacaagacctgatgcacagagtcgactgagagaagggccaaggtagacgatgtgaatcgtatattgactcatcatcgatgccaccagtagtctgtcgaagtaatagacagcatgcgatcgcatcggtacagggaagctagagcatacaagatatttgtccgcttcgcattcgactcgagtgacaggaatacgaggggcgtcctgttgtacgatccgagccagcaaggcttgaaccagttggagatgttatagcttacttattcgtaaattttacaaggcgtgcacttgagacgaggcgataattagcttcgtgatcatctcttactgacgagatcatacacttgttttcatcaatgcaaagtcaccattcatgttgtatccagctcgttgcaacctccagttgccgctttcgaggaagctacgctgtagcgcaccgcgcattttctcgcgcggcatagggcgtgatgactcaccaggcacaagcaattgaataactagctgtaatagatgaatgtttcgtgatgcgaacggccagaggctccgccattcatggggtgaagacggcgaggacgaacacgcgatggagaacgcgtcgtgacatcctttgatcttatcttattttggtaagaatgatggtattaacctctggatggtatgagatctcgaaagcgatttggctaggattaccctgtcacgttcatatcccgctttctctgtccaaggcttgacaatatgacgcgcaatcaaatgagaatcgaattgcttcaagcagaagtcgacgaaaacgatcagagtttctttcgtctcctggtcaacgatcggaacataaaatatgtcactatagaccctggtctctatagtgttgacgatatgtatttcggcccctcgctggtttcacttctacccacccgctggagattggaacgatggactggtgaccaaaaacgaagcgaatggccaaccccactttgcccgtgctattcggtcccttttccctgtcgtttaaaacacctggaatgaaacttttgttgatcatacggagatcccggtcggagaaaagttacgaacgggcgtttgtgaagtcagatgcaatttgttcgacgtggttgtggcaacattcgcccgctttgactaggagatccaatatctagagagtgagaccacggcttaccaatgaattgagggctatgatatcggcccacgattccttggccatttgacggaagatggccgcgtgcttcggattcttgatggaacgcatcaaggatgctagacatgctggccctcgggacctcgagacctgtcagaaggcattgtctcgattacatcgcctagggatccaccatggagatacaaaccgattcaactttcttattcgtggttcgcaggctgttttaatcgattttgactcggcacgaaagtgtggcgaccaagatgcgcttctgaaagagctcgaacatttaccgaattccctaaaggatttatcacgtcgaggtgggggagggctcctttgaatagtcagtccttcgaatgcatgcctctggtttttttgcgtcgtctttgatgccagtctggtttcagacaggatcgggttgaaattcacatacttgtacgaaaaggcgcttttttgcatcgaagatccctctaggggcggggcagtgtatcagcgaaatcggctgttatggtggagagggatgttcgtcaagaaggtaaactttacctgaccaatccaagtcctatctttttgatcgactagcagggtggcacggcagaccttgctggtaataaatctctcggtcaacgatttattattcaagctggaatttgaatgatcttcccaaagtcggttatttcaagtaaatttcatagttcttcgatcaaacgcgccattctcgctctattagctaagcattcttcaatcacagcatttcatacttagagataggttatctccaggtaaatgtttgtctacttatgtagcatagaccgaatataagatctatgcagttcggagactggttcccggcagaagccctctcatccaccgcggttatcgggccaaacatggagaacttctcagaaaattcggagatgacccttatagaataaggaataaccgagaaatatgtatattgaattcttcagaggcagtcggtgtttctttggccccccgcgctcggagttgtggccgagatccaaatccaaggcttccccggatcttcagctttattagcaacgtgctgcccctcttctctgttcgatcagataccgggaaaacatcctttttactagtcaacattttataatatcagagaactcagctatgtatggagttgccccacacaaacattcaaatggtctttttactcacatactacaagggcttatacagcatcgtttgctttcttcgaagccctctgggaggtatgtatatgtacaatagcatctttatacaccaaagcgtccattctaacctctacaaccttagggtggcgtcagccatgtctttgtcaatttgggatcagaccacccctccatcctcgaggcgatggtgaaaggccagaaggaaaagaaaggccaattccctactataatcacctgtcccaatgaggtacgttagcaattgcattatgggacccaccaagcctaacggcagcacttcggttagagtcggtatgaatgtgagccccgctgacgatatgctgtttagatggtggcactgtccatggccgacggctacgcacgattgaccggagagccgcaagcagtaatcgtccatgtcgatgtcggtacgcagggactcggagcagcagttcacaacgcctcatgcgggcgcgccccggttttgatatttgccggtctatcgccttacacgatcgagggcgagatgcgaggttcacgcactgaatatatccactggatccaagatgtgccagaccagaagcaaattgtcgcccagtactgtcggtacacgggtgagatcaagtcgggcaaaaatgttaagcagattgtcaaccgggctttgcaattcgcaactagtgatccacaggggcctgtgtatcttgccggggcgcgggaggttatggaggaggatatcgagccataccagctgaaccaggctgtgtggggtcctgtgtcaccggccgccctaccaacctccggcgttgagttaatcgcagctgagcttgcagctgccaagcgccctcttatcattactggatattccggaaggaaagcccaagctgtgactgagctggtcgcattggcagatagcttcaagggaatccgtgtgctggacactggtggtagcgacatgtgcttccctgctaaccaccctgcatggttgggattgagatatccaggccatgaggcagtgggaacatctgatctaatcctggtggtagactgcgatgtcccctgggtgcctacccagttcaagccgtctgcgtcggccaagattatacacattgatgtcgaccctctgaagcaacagattccagttttctacattcactcgatggctacattccgcgccgacgcttccaccgcactcaagcaaatcaacgattacgttgcttctcgggaatctctgcaacaattcattagctccaaagataatattactatgggccagcgccgagacgaggagtattcaaggcgtcgacaagagatctccgatctggctgttatcccggagggcggcgacggggcttccttgaatatccactacctcatggcgcaggtccgcgagggcgttccgattgataccatctgggctattgagtccgtgaccatgacccactttgttgctgatcaggtctcagctacccaacctaagtcgtggatcaactgtggaggtggcggtctcggctggtccggcggtggtgcgcttggtatcaagcttgctagtgacatacagcagggaggacgtggaaagggaaagtttgtctgtcaggttgttggtgatggaacattcctcttctcggtgcctggatctgtgtactggatcgcccgccgctatggaatccccgttttgacaattgtgctaaacaataagggctggaatgccccccggcgaagcatgctgctcgttcatcctgaaggggacggctctcgtgctacgaacgaagacctcaatatctcctttgtgccaacgccggattacgccggtatagccaaggccgctgcaggcggtgacttgtgggctgggcgtgcctcgactgttgctgagctcgcccggaagctcccagaagctatccagagtgttctaaacggaaaggcagcggtgctggaagcacagcttgacgggaccgcaggaaaatatgtagaaagctcgtgagaaatggaatttggagggcatgaggtacttttagagtactagcggtccatagactgttcaatgagagttacaattcatggagtaaaaaaagcgagatttcaagagatgtatattttgtatgcaaaacacatgcaaaagatacctcgtgaaaaaagcatcggtaccccacgcccttcgacatgctagtgcctccaattgatagaaatacactatctgtccaagctattgaccccaacgtcaaataggaagcttatcaaaagtgggctgtactccgttgcaccgtaaatgagtcatctggttcggagaacgctggagagatagatttccactccgctttcgccgagtcgcccttcgcagcaccttcgattgctcctgtttcgtttttcttcttaaatagtccactgtcctttcacacaatcaggccaatactattacgtcctacgaattcgatatacaatataccccgatataccaaacacccctccgtataaccccgcgcatacccctccgaattccgcatttcgcattcacaccgccaccaactcaattgctcaatcacaatgagtccaccggcacctcttgatgtcgacctggtgggcgtcaccgatacctcggctgtccctgtcccagatcccttaaccatcaatggcgtgtcagcatggcgacagaagatggccaaggtccccaccggcgtggccgcgccatccaacagtgacatgttcaagagtccggtatgataactctagattgtgcataggcctcatggagatatgaccaaggaaggcaatcaattgcaggatacagaatgctgatatgtgtctgaggcattagatttgctacacaaagcctaaggccaagcggtttgagcgtatgtctacctttgccctttgcgtgtggttttcgcaattattcccctgatactaatcattcgtttgcagactgtttttcgaccgaagccaagtctcgcaaggttcgcacccaatcgcgcaatgcgaagtccacacttgctaatccttccacaccttaggcgtctactttgaagactgctgctcgttacctgaacaacccaggtaatactcccggatacttctctttcggttcattgattaattctgtgttcaaggccttatttcgctcggtggtggactgccctcgcccgaatacttccccattgaacatttggatattaaggtcccgactgtccccggattctctccggaggctactcgggagtcaggcacggttcttcgtgctggaaagcaggacattaaagatggaactagcctttacggtgagtccccgttctttatgtgcattagaaatggccatgactgatccaattccttagacttggagattgcccttaactatggacaagctaccggagctgcgccattgcttcgttttgtcacggagcacaccgaagtgagtataaaacaccatatctgtcgtctgtcagcagatactaattaaattagatcatccacagccctccctactctgactggcaatgcaccctgactgctggcagcacctacgcctgggacactgctcttcgcttgttctgtgagcgcggagactatatcatcatggaggaatatactttcgccagtgccgccgagactgccttcccccttggtatcaaggccgtgggcatcccaatggacgggcaaggcctcatcccggaggaaatggacaaaatcctcagcaactgggatgtcgccgcccgaggtgcacgcaagcctcacgtgctatacaccatcccaacaggccagaacccgactggtgccactcagtctgcagaacgccgccgcggcgtgtacaaggtcgctcagaagcacgatctcatcatcgtcgaggacgaaccctactacttcctgcagatgcagccctataccagcggggatgccactccagtgcctcccccctccacccacgaggaattcatcaagtcacttgtcccctcgttcctgagcatggacactgatggccgtgtcgttcgcctcgagtctttctcgaaggttatctcgcctggttcccgagttggctggatcgtcgcctctgagcagatcatcgagcgcttcctccgtaacttcgaggtttcctcgcagaaccctagcggtatttcccagatcgcgctcttcaaacttctcgatgagcactggggccactccggctttttggattggctgatcaacctgcgcatgtcgtacactgctcgtcgcgactcgctcgttcacgcctgcgagaagcacctgccccgcgaaatcgctcactgggaagcccctgcggctggcatgttcgtaagtattccctgtctattccactcacatgtcattcagcaatgaatactaatatctaccagcactggatggaaatcgactggcgcaagcaccccggcgttgccgctggcaagactcacgccgaaatcgaagaagagatcttcttgtccgctgtgaacgacggcgtccttctttcccgcggcagctggttcaaacccgaccacgacactgccgaggagaagatgttcttccgcgcgaccttcgcagctgcttcgtcggacaggattgacgaggctatctctcgcttcggccaggctctgcgcactcaatttggcctgtaaattggttcctgacctacgattttgacgaatctcttttatcataaagaggatgcattaacttgttagttttgtgattttagatggtagatatcgcagttttataaagggcgggttttcattgtgttctagagaagcatattgcattctctctttttggttaacttttgacctaaatagtcaacaattctattgttttattcttctatcgggattcaatatcgagtcgaaagaaatataataatgcacaaaaagaataatggttggtatcaggcaataataaaacaaaaagtaacaataaaggatgagaaatatatccaaacgaatcaggagcattcaaggggatatcttcaaaagagaaaatgatcatgaccccagaatcttgccataagcatcctccacctccttagcaatctccaacagcgtgacaataatgatctggtgcgtcacattaggcagcttatcacgctgcagcccaatccactccaacggcggcgtagcctcacccatatcccgcagctgcggggtctcaataatcggcggctcaagcgcagtatatgtatacctggactggggcacattaacaaccgcagtgatcttctcctgctgctcagggctagtaccactcccttcaccactactagtgatgcgcaccgcagacggcggtaagggcttgccaagccgtgacgcgagcgcccgcgagtgcgtctcccacatatcgcgaatgaagctgatgcgcgagtaattccagccgacatcgactttgccctcgaacgtgctgcggaatatgtagtcgatctggtggcttcctggagcctgccaggtttccatgctcgcgactagtcgcggtactttgaggattgttccgccgcgagatactgcggctcgctcggaaatctcgtccaccgagagctcgtcgagttgcgcggatgtaggccgcgtaatgccagacagcgctacgcgaagctggcccaatgttaggcctagggcactgtggattttgttggcttcgagcgagacggagaagcgggcctcggcgtcgtgggcttctaccttgaagatttggttgtcgaagaatgagctggggaatgctcccaggttgacgtggcggatcttcacgaccactccggtgtgtagagagatgggtgctttttcgggcttgtcgtggtctttctttgcttgattcttggcgctgacatcgaggcgctcggtgaggacagaagacttccggcggaggtaccgctctacctcgcgtagtgatgctttgtaggctgcttggacgtcttggatcaggcgctgccacgcctggaatagcgccaatgtttgtgatgctgtcagagatgtgcagaatagctggagtttgtcgccttccagaatactgaagaggcgctggctctgcgcgccggatgtatttcggacattgtacatcaagaaattgaacatggcgatctgtgcaaccaagaaaggttggtaatcgaatgacaccttggcttggaggtgttggaaggcaattgtggcttgaatcaacggtgtgtgccctgcctcacaggactcgggccattcaatggaggtatgaatcctcagcgttctgagttcgacaattccactcatgcgacccttactctcgatggcaactgagccaaagtttatacacatgttctgttcgctgtcagatgtcttgctggtagacacccacagatcaataatggcgaactgtgccttgcctagggtcgagcccaaatcgagttggatttccaccttctcaatcgcgatggtagtggtccaggggaatgcggacgccgaagcaacctgctggtagcgctgcacgatatagctttgtgtttcggacggtcctggctggacgttctcactcgaggtggtttcattgtcggatggaagccaaatttccttgaagagcaaagagtcttgaacctgtttggcattgactgcgaccttcattggactgacgcgcaaaatagctgacattccgttcatccggccaaggtgcttgctgttcatcaatgacagcaccatggactttacctcgaagcttgcggttgattcattggagtacacgtgttttacagatgcttccaagctgttgaaagctaaagagagagcaaggaaccggccatggtcttccgagaggaccgtgttgacagtcacgtagacactctcaaaccttgcagtagctgcgactcttgcaataggctgacagcttaagctaaattcctgtttgtaaaatagcagtcccacgtttaccttgcaccgaccaaggatgctggttggatcggcggcatcaaatggcttttcctgcattggtttctgtgtctgaaatttcgctgctgcagatggctttcgaggctggccctgctggttgcccatgatctccttgactgtggcggtcatctgcttgacgagaggaacaagggttggatacaatgtatttgttgaggggtcgaccttcaactccgcattgagcgcaggatcgtcggtgccgttgtcctcgaattggactttgagcgccactcccggtgctcgcagagttgctgtggtcgctacatcgccttggacatattggccatattttgcgtcagagagtcggctacccttccatgtggccgctagcaatgtctggtgatcatggccaagttttccttgaagcgtgacaatagcgcctgcaaagtcaacatcgacgaggagagaccgcaatcgtctattaccgaaaaggctgcgatctttgttggtattggtgttttcgggtgagtctgctttggttgcccaaacagccttgccttcacgaagcgcctcgcttgctgtagacattgagtcttgtatcatactagccggaatgataaactccgatgtggcgcgtatgtcgagggatttgccagctgcttggaaagcaagacacacttccttccctttggaggcatacgccacgttgaagaccagctctggcataagggctgaattgagcgagcgcttttctctgtccgctccgaatggtaccatctgaagttgcatgttttcgattcgaagtttggctgcgttcttcttcttgttggacagttcgacttgttggattgaaaagaccaggttctcgggctgtcgaccagattttctgtggaccgtggtcatgttccaagcgatctgaatggctcggaattgtaaagagtaaagagcatttaggaatgtttccgggctggaatcatcgttgacgtggatttcaggggcagcggtggctccgtcttttgtgtcaatgtggccaccatgtcttaatctcctaagacgcttgacttcatgggaaaggtccagggttttgatgcgctcttgtgtatagacggcaatatcgaccacaagggctgctgtctcagcggaaagttcgacatcgaacctatcgctagtgaaatggtatgctctagtgatctctccattttggcggatcgctgatgttccctgaagcttcactccagcagagaaacctccgtatgattgactgctagccttttgttgttttcgaagctcaaatatgatctggggagcatcgatattgaactcgggatgctccatggcgtatccccgatcgagtccattttgaagtcgcatacgcatcatcccaaggctgaagatcatctccgcagagtagtctttgccctttaggcctggtgcaatggcatgaatctcgaatccagccattgtgagacgggatttgtagaggatctcctggctgtcagatgctggcttgggctttggggataccttctgtagagacagcacgtctttcaggtgtaactggagaacatctaaattctgcttgatatcacaaaccaaatgggaaacatccggtcctgtcaaaacagcgaggagactgcgcacagcactggcttctaggcgaatgagttcaatcgtgatatcaatctccacttccttgcgatccggtaagagattagcaaggattcgcccgtttacgggaggtatttccagtatggacagaacattgaacctgtggctttcacccgatacgaacatgtgcgagttcttcttcacatcaaagtcaatctcgattttggatgcctccgtgggcatcactgtcatgcgagcgacctcgccggacagaagatagctcaaagatggtaaaagggtaaaagtcaaccgatagtcttctaagaacattgccacatggaaggtgtcacgagtgggtttatttgatgcgaggctctgaccggtttccggatttggtaccttgacactatccataagctgtcggatgtatctgacttcgtccgcgatgagtctatctgctgtatgtgctaggctgacagggtcttctttcatgtcataacgaagctttctgcaggacccagctatcttccaatcgtgtctgcactcgttgtcatcttcctctgatgcaagcgaaaggtacacgtatgggtcggcgattcttgacaacatcagagtagtagattggctttgaagctctgacgagcatccttcagcgctaaacaatacagcgagatcttctggttctttggcaccaagcgccttgtgaacgatcgatcctcggagagccttcgctattagagcaagcttaacattgacacagtcgagagtgatggaaccaaaatcagtgccaaacattatctgcagctcgatcggtgtcttctcttggaccttgtcaattgggacatgacccggcgaggatgcaagtgtgatattcgacatgaccttgatcaccccttcagcgagatctagaatttcccagcgcagcctcagggctgttgatccacaataagactgcagggtgatgagttgcttgctccccccttcaccctcaggcgcgtgtggagcaaatgatgcaacagtggacaaattccctatgaccaaatcgctttctttcggaccaggatccatggaaaattggaatgtttgaattgtggaggatatgaacatcgaaggctcggaagtctgccgttcggcggcgtgcggccaaacacggcgcatgacatagcttttggcaacatgtgccaggtcccaagcccgccagcggtcgaagccggataatactgcctttttggcattcgccggcagaggaaaattctcacacaagcatttctgctccaactcacgcttctgatgagcagacagactttcataaatcttgcgaatgcgagatataatcttccacgagtcatgctgccgcaagtgagtcgaagcaaccctgaggacgtacgatatgcgagcaaggaatattggatccggtatatcagtagccgattgggtgagggagtacaggaggtactgtaaacgcttttcgctggacgttaaaatctgttgaaaggatgacgcgacagaatcaaacatagtcgttgctcgacgaacgagaaatgcaagacgctccacagactttgctgatgtcattgtattgaatgttcgcatctgaaggttagagcgaatattgggcgaggtcacaagccagaaattcatatcttccatgtgtgagttaaacacagctttctcatggaaagaatctgcgcgtctaccctcgatagaaattgaaacataatccgctgccgcatggaccgttacaccttgtttgagaccttcaagtaaatcacctttctgacgttgaacctttcttcggaactcagtatgcagacgacggatatctaagctgtattcatctcggaactcgacctgattgttgttgggagccgcagacaggtcaaccagtcgtaattgaatagatggaacataaagagagacagctgttgaaattctcggcttgctcatggcattgtcatagccaacgatggaagatatcacatccttttgaagcgagtcaatgattcgcgtaggatgctttggttccaacccatccagtaaagtagctagacttagaaggaattcgggtgtacaaaaccctcggatcccgagggggaggttgcacgcaaggtttatgtatttcgtttgatcgtcatcaaatgtgagaaacacggacttttgattcatgcttgagtcttcactcattgtgtcatcctcatccacaaatggcaatggaagttcggatgtatccagatgaagcttgtagtacgagaactgtggcattatccacggatttgtgtctctagtcgtagaatgcgaggatgcgcctacccgaggcccgtaatttggtccatctctcgaccggttggctttcgagacggacgcgctcgatcctcgggtaggcagaaaaggccgcgatttggaaatagatttcgaggctgctctggggctgttgacagtgtgtatccggacacttttcatacttgatgcttctgactggacaaaaaagctcttggcacttctagtggtacgaggacctgaagctccttgatatgatggtgcatcaacagagccaatcctgtcatgaataggctcaggcattgaaggtatggccatagttggagggaatacgtcgtcgtcagaaggaatggttgaagctggcccagtctcttcccagtcaaaaagcaaccactgtgccctgtgagtacgttgatcgtgggttctgatatgttcttgctgaagtcgtcgactttctgcaatatcggatttgcgtaaagccaacttcaccccaattgtgagctggaaaagtcctatgggagataacattttttcccccgccgatggattgcattgagagacagattggcgatcaacggcagcgattgagatatccggaacgagaagactcatgcgtttcgaaaatttggtgtttgcccaatcgttgaagttcacattcaaaggctgtgtgctcaaaatcacagctgtctggtctagtagcacggaaatatgaattgagtcaaccttggccctcaagaaagtcacgtcaaatagaagctccgggaaaagcatcggcaacgcattttcctcgttgtcaaaggagaaatcaaagctcttcaaagatgaagccaaacaggccaagaactcggtggagcattctccgacaattcgaccgacatcaaaatcccaattacaaacatatgttggttcaagcgggggcaaaccaaacagacgatggccgtaaaccgaaaccccatcgatgaacagctgagtgctagagatagtggaagggccatccagttcagtggtctccaaatcaattttcaccggggtgatggaaaattgcaaatccatatagtagttagtaaaacgcaaattcgcttcgagggaggctgcgctaagtcccatgcactttgagtgatcatagatattcacaggaagcaaggcacgggggctatcaaccgtgacgcgtacgagaacatccatgtcatttgactttcggtttgggttggtgcctgtcggatttgacggtggctcgtcggcatagactagctcttgatattcttcaagtgttctgaagtgcatttcctcgccaaaatagttttctctgattgtcatgaaactctcgaccaagaatccaaaaaggtaaagacgaggtaaagttccatcgacgttgagcatcagcgtgtcagtcagttccggagatgttgactggaaatagttataggagccgtcaatgaacaaattctctagagtggccatggatttttgcggtaaaaattcatgcaaagtatcccacaaaggagtcgtgtagtccacgccgccgtcttcaaggtttaccctgaagtcgatggcattttgttcaggttggtatttgtccaatggtatcatggcatttgccgccaggcgcttgcctttgataacaagaaatcggttgtcctctaaatcagaaggattgctgataatgtttcggtcgttgacgttgatgtaaagttggaagtcggagaaattgagatcgagattgtaaataaaaggcacaaatgagtagtagtccgaaggcggtcccgaagcccaatcgcttacaagatctgtgagaaggaatatgtgatcacgtaggagaaacagctgtaggtcgtggttttcggcagtaaatttccaggggcgaagaccattccaggaaagtgggttggatagatcacaagtaatctgttgccgaggacattgccaaagcaagccatggtttatgctggatgataatcttgactctcgcaagtcgatagaaagtccattggaaaaccctgtgctggatcccaccatatccatggtatagttgatggtagagtcggcgccaacacaaagggaaagccacccaaacgggcgaatttcagggccgaggtagcctttttcaccttctttagctcgagtcgtcttctgttcgtttggcttctttgttctcgatgcacccccaacggcatcagcacgacccttccattgccaatccttggaaggctctcgtgtcggaatacgcaatgtcaattccctattgatttcaatgcgcaatctaaatgccgtgctttgtcgcagagcacccggtgctagtttctctgtgggctcagcgttgcgatagaagtttggaaaaaagacattctgcaggccaacccgctccctatcagcccagggtccgtaatttatcgtaccgccgtgaatcttgaggtccatcccccattcgggagaaggagcataattgatattgctatccattgattgagactgagcagctgacggtggttgaataatgactcgtccagggacgtcccagaagtaggctatattcagcatggggctatccacgatggtagagaacctggcatattcgactgagttccacttctcgtggtcatccccactatcttcgtccagataccgagagagaccggtccagcggacctcaggaaactctgcctggctcctcggcatactgttggcgtgtctgccatcgtcgtggaacgattcgacagatgtctggaaatatgggaccaagtctcgaatactgtgccatactctgcgcctctgaaattggtagttgaagatattttgcggtcttttcttcgatgcgtggtctttctcttgctgcgcacctagatctttggcggtcgccgattggttctgcttgaagtccgggtttggccgcatttggaccactgcattttttacttgaaatgagaatatctgacgatacaaatcaagaggacctgaattggaagcgtcgatggtacccattccagtgtcgaacgtggttgtcaacacagatcgagtatgctcattcccgatgacaatggctcctttctggcaatccagcttcataggcaggagttgtaacatgttggacacaggatccgacagttctgatccacgaatagtagtcttttgcgacgcaactccgctcctctcactcgtgctgcgctgtgacaagggttcgatggttggccgatgtccaggcgtatctttaaaatcaaaggcgttgctttcgttgccgttttctgccgccccgcgagatcctgggggatttgaattgtcaccgtctaaatcaacatttttggaagagtatccaaacccagtaaggatactgtcataggcaggtgtccggttgtagatgaaccattcaaggccatatgtgttgatagtaatccggcacggcaagtcggtcgtctttcccatgccaccttgctcccccagattgtcgtccgttgcatcgcgcgggcacgcttcttcccttgaggtatgatgagcaagacctgtcttgcgtcgaatcccggccaaatcatttcgctcgactgtacgcgtccaatagcgccatgttatgaatcctccatgaataaagatggtctcgttcaccccatggtaccgaatgcccttgaagaagattcttccaccaagtagggagacttgaagtgcgtttatatcaacatatgcgcggtagtaatgccatgtgtatgatcgaatcgcgtaggatatgaggttcgcgaagagtcggttgaagtagagcaaaaagaacagagcgctataccgttgatcagcgtaatccagtcaagttggaatagggcaaacttacagaatgcaagagacaatcagttctaagagaaagaacctagatcgatcagtataacagccatggttcaagcagtccaagcagcgattccataccaattgaagcttggatccggcgtcaggaaggtcgatgtcaaacttgtactacccatctctctccgcctgtcaacatggacagcgccggcgcgatagaacgcgaatgacgagccaaaattgacctctcaatcatcgacaccaaaatggctggtcaaatatcgtggaagtcgcaaggcgaggacgttgataaggaagaccgagagcggtgtcacgcgaggatcgtcatcggataacacgcctcctcattccgaactaacgctcctctagcttgttctccccccatttcggtcttgactaacatgttttgcccctctatcgactctgcggaatgagctggattacctccgtaggcagaaaggggtccttaaaccgtgtttccccctaaatttcagcaatcatgacgaccgcagctggcggaggaacaggctccagcctggcacgagcaattatcattgtcacaggtgtctcggctttggtttcctctctcttgtcctttgtgtcagtctatccaatctttttcgacctaactcatggtcgcgctcgctgtaaactccccggctaacgtgttgtctcaaaccacaggtccatatggtttcaaacgtacgagcttataccgtccaaattcgagaaccgtggctcaccatatatatagcaaaaactaccggaaacccttactccaacgctacgttgtgcgtatattgttgatgttagtgttgactcgagtatcagctcagggggctagggcaaaaaacagtgctgattgaacttagggtcccgatttacgcagtatcatcatggacgagcatcatatcgctaagggcggcacagtttctagatcctgttcgtgacatctatgaggtatgtggggctctggccgactgtccgataagccctcattaacgaatggcattggcaggcgttcaccatctataccttctttcagctcctcatcaacttcctcggcggcgagcgggctgtgatcatcatggctcatggccgccctcctatctcccatgcctggcctctcaatcacttcctcccaaagattgacatctcggatccccaaaccttccttgctgtcaaacgtggtatcctgcagtacgcttggttgaagcccattctggctctcggctccatcataatgaaggcaaccgatacatatcaagagggctatattgggctgagctctggatacctctggacaggtatcatatataatgtcagcgtcacaatcagtctttattcccttgccatgttctgggtgtgtctgcatgatgacctcgcgccattccgcccagtccccaaattcctctgcgtcaaactcattattttcgcctcatattggcaaggcttcttcttgtcgatactgcagtggctgggagcgcttggtagtgttgctgggtacacccccgacaaccttgcggcagccattcaggacagtcttatctgctttgagatgccattgttcgctatggctcattggtatgcattttcgtggcatgactatgcggacccgaccatctcagctgcgcgcatgcccgtaaaatacgcgctgcgcgacgcattcggcgtgcgagatttggttgaagacaccaagttcaccattcgcggtaagaattacggatatcggctgtttgactcgggtgataatatcatcccgcatgaggagtcagggtcgcgggtcaagcgagtaatggccggcatgagatatgagcgtggaggtaaggcaaaatattggatcccagaaccgggtgaagccaacagccgcacgcctctattgggcggcgaatccagtcagcgcggccccggaaataaacgggccagtcaaacctccagagagagaatccgatcatacagtgaaattgatgaaaccgcactggacgacgaggatgagcgaatattcctcaatgctcgcgcactagaatatggagactggaatgtgagttacgctgatacagagtggtcgtgattgcaatgctgaccgcgcatagtacccggtgattaccgccaacgtggtgccaagtgaccaacggctgccaccctcgcggagaaatcaagattcaaaccgaggggcagatgtcaaaaaggcccataggcacaggaaaagtcgcgcgtcaaatggtgagagtaggcaaagtcacaagccaaagtccaaaatagcgggcccaagctcggcgactcccggtcccttgaagcgaaacgtcagttccaccagttctagcggtacgcagcgcagccagctggttgaccttgtggtggagaatacagaggctgaagaagaagttcgagcccaaacacagagagagtatggctctgcctgggcagagcctgaacctcgacgattctcgtaagttgccaaatcgcgcatagcgacactagaggcttcagagcagagttattaatcccgactccaacctccagaagaccctgtgaagatctaatcgaagaagaggctgaagccaactcgatacagccggagaccaatcatgacgaagatcggcccaaatgggcctacgacgatctagagcaggacaatgtttggggcaaatagtgcgcgttctatggtgtatggtgtactctgtctcttcaattatctcggattatgatcatctaccttatttactcatttgctcattctcggtctgatatgtttgtatctgtgttctgtacatatccttcgaaatggaacagaagaaaggaaaacattatgaaactccgagaaattctaaagagatagaattatcctttccaatctctgtaagcgcccgactttctcgtcacaccaaaactggacttgataggcttgagagggtgtagctcaaaataatgagcacagatgtgataaccccactagacgtcaacgaatagtagtgcttcgatcagctctgctaccgacgatcaatgctgctaaatgcgctggcttcggcgtgcatgtctttactgggcatagaccccggttactagtgccacgatgatatgtacctggacgagttgggtaaggcgctcatctttgggcttatatgatggatgttcccatcccgtctgaggggctgatttgactgcctgtgcaactggttcgttcctttcctttgttttctcctttctttccctccaaggtgatggattgatttctcgcgctggtcgccatcatgctggctttggagagggcggggtcgttattcactggctggatacgatcatgctttacatttttacctggtgacgatggttgtcaacctagacaagctgggaacggtatgtgtccgactacgtcaaaaatctagactcgatgggactaatatacatcgcaggcgttgaacgggagatgaaaatatgccatactcaaccacatcttgttccacctatgaagctggtggtatacgataacctccccagtccaagtgtccatcaatctcgaaactcactgtcatcatggttcaacgacagtcggaacttggcgtcgcgagcctctaaccgggcaagcatgtctttaaaacgctcttcaacgaccccattgaagatcagcgcaccttcagactttcgcagagtgcaatcgttccacgatcacccacattcattcaattctccgccaccaacctatcaaccattggatctccgcattcatcgatcaggtaatcgattgtctgaattaccttcattcgaaaccttccaactaaacgaaagccctcagcgcaagacgctaccggtaccccctcgtgccctcacgactccgaccaacgttcgtgatcgatattgccaaaaagcatttgtagtctctcgcaagccagttgggtctcagaaacgccgatcacttggtaatatggagtccctgctcgtcgaagaacccgttcgcgccactagtactctggtaccacatttctccaaggtcatccacaccgagaaacctctcccagaagctcaggcagcatctccaatccacggcaggtcaaaatcagaaggaagcaaggttacgtcgaacacccgatggccaaacgacgcaaataccacctggggcagagtacctcggactccacctgcatccaacagtgtgcacagagactcgccggatacatccccatccaagtactcggcaatgtccaaggacagtccttcgtcagccagctcgcgcacgatgatatcacaaccctcatcgcgccgtccctcaattccacttcccaagaaccgagactcaatcgatgcaatcccattctctctttccaaccgcgtaactcaatggatgtgccctacacccaccaactcctctccgttccccaggcaagcctctatgcccggcgagaaagggtttaattgggagcgaacccgcacgctgagtggcaccacagtggcttcgactagtactacgactttcaccggcggcccaagaacacggaataatggctccatctctagtgccttctccagtgctattactccccgcacctcattccaagtcctcccgtctgctacagaaaaagatcttgacgctggtgtctgctacccgaccatcttcgaggaccagcaacagcaccatcacctatcttcgtatcatgacaatggacatgtgcggtaccaagagtctagtattggggtggcgttttaagttgtctggattttctttggagatgacacttttggccattctgagattttgataatgagttacccagtctccttcttttctttctgttagaattttggtttttcttggatgtctgttgggtattttcttttggacttgttttatttctattgcgcgttggaataccccgttgtgattccagttggttagttctttccaaggttgctatttgaggtgattaaccgtggtacatacatagcttatgtaggaagtaataatgaaaacggtctggatatgactccatgggatctttagcagtcagaaaaggattatattcagtattctactagggagaagaacaattatgcaacggcaacacatatttcaaggtccaggctaacacacatggcatctgaccacgatgtctggacataagtcaattgtacacaaaggctaacgatagctatttctgtagggtatctcaaaaaagacaatatagctgtcagaaaaacaaatagggcacaagttaaaagaaaggatgaatgttatgtacaacatacagcaaaagatcgacgtcttagctttcatacgagatcaaagctttagtccgtgactatatccacaccgtccggggaagtacttatggggccgattttgcggggtttttgcatgccgagaatctcccaggcacggcccatcataccatggcctgagccctggggaaattcgacagaagccttgtgagcatgtctggagacgcgatcacgcatggtacgctcctgcttagcggcagccagacggtcttgttcacgttcgtgattgacaatttcgtcgcgccattcggcccagtgctcgaagttttcgcgctgctggagtacctgataacggaggcgggtcttggacggacgccaagcagcgcgacccgctttctcattgccgtcactacctggaacagccatcgtggacttgagatcggggacacgggactcttttgtcagtttgagaagatgggtcatgacatcccgactttcgagggcagtgcgttggattttttcttgttcgggggttggtttggcacgcacgagcggcgcatcaagccatgcgtgcatttcactagatctctggacggagtatgggtcgaggatgttcgaacggcggttttcctcgcgcaggaaacgcacagctgcttggaggctttccacctcagcgcggagagactcgttctcgtccatggcagctaaagaggcctcactagcgatgatggcgctgttacccgtgggcgtcagacctactgttccagacatgcgcttcattcgatcaagacgagccatgaactcatctcgctctgcttcggctgtctgaagctccttcttttgttgctcaactattttctcgagttcactccctgctttctggatttcctcgattctggcttcgagttctttgaccatggcagccttcttgctcgcctctcgcatccttgattcaagatgctcgatctttaggccctgttcttcaagggtattgtccttgactccaagtgcggctgacgcttcgtgaatctcatttctcaactggcgaatctcctcgtctgcatccggggatgtcattttgttggacttcaattctgcagcgcgagcgacccaggggaatgcagctctctcgaactctgtcgtgcgagacagatctgatgaaatggtatccagctcctcaaattggtcgcctacttgttgcaatctggtaaataacaatgatatagggtcgttactttcatccaggatttcggaggacgaggcaaaggacacggcagcctgggacatacagtccagaatctcctccgggctaaatgggtgcgtgcgaccttcatcactggtgaggacaacaaggttctcgccgagctttcgagcaaactctgaaagttgcttggtttcattctctatcgtcttgaacggttcttcggcgtcctttgggagcgcaagtgacctagaacgcagatcatcaagagaccggctgatcttacccatcgcaaccttgtatccgcgggcctgagaggcgaaggtgtccaatttattcagagaaatcaggttttcttcgtcgccttctgccgcggccaccatcttggagctgataatcagcttaacgcgtgcgattgcaccggctgaatgctcaatgtacgattgagacaaatgggcccgcatacacagctcatcggcaaacatctccaagctggaaggaagaagggtctcagcaaggtgtgcgaggagagcgatagaccgctgcaattccactgcaaactttgcaagattcacttcgtccttcttcataggctcgatccagaagttcaacatgcgctccactggctccatttcgaacattgcgatcttgatattggcaaattcctcgggcgagcaagctgtgatatagttcacaaagcgatcacacacgtttgaaatccacataagatattccaaaaccacatgagcttggaaaagttcctcgttggagactactgagtgctcagatcccttatcttgtagagtgctgctcataacattggctttgaatccgacgcgcttgaatcgaagcaaagcctgaatagaattcttttccccttcaaagtactccggaagatagagctttatcatcgaaaggtgctgtgcattttcttcggactccatacggttcagttcaacatcgatagatttggtcagggccttcgattgattggcctggagtttcatattcaaatcttgcatctggcggtggcgcaatgcattttcggtggtctctgcctccgaaacttgctttgtcgtgcgcatatcatccaagtcacattgcaggttcgtcaccaaatccctgaaacgcgttaatgtatattcaaggtcctcgataacttcgtcctgttgcgtgatctttcggcattggtcgctgaacacactctctcggtactcaatttcttcttgaagttgcttctcagtctcaatatgggtgtactccatctcatcgctaatctccttgagagattccaaatcctcgatggcagctttcagctcattaatctcatcctggtagcgcatgtttttgtctgctaattcttcaatcatttcttccgcccccagtgctgtctccagctgctgcttaagattatcgacattggtctcagcgaccaaaattctctcctttgcagcctcgtaatcagacttgacggtagcgtactcctcgagatcctcctccaattctttgatctgagacttgaggtctaactcttgctgctgagtcatatctcttaaacgaatgagcgcctcgcggagacgttcattggttctttccatctgaagccatccatgagtggttctgtcttcgggggtggtctcctggctgtattcttcattctcctctcggagaacctccacctccaaattcagctcgtccaaccttgatcgtaacgctgcgcactcatgtttgaatgcctccgctgtctcctctgccatttcgcggtcaagagtagccatttccatgagcgattcatgctccgcctgcatgcgttccacgtcgtcagaacgagcctcaagttctttcaactttttgcgcagctcggtgacttccatttgctgcggttgatacttggcttgaagtttctggatgatcgtttcaaatttatcacgctcagcctggagttgctcgagggtcttcaacttctctttgtcgtcggctcgtttcttttccattattctgagcttggcattaagttcttcgagctcgcgattaactgcactgctctgcccctggcgttgagatgcagagagcggggccccaggacgcgaggctgcaggtcgcgaagcagtcatcgactgtcgagaggtcttcggcccggtgagtccgtcttgtgcaccctccccgtcagtgtcaggcgactcggtctcggttggatctccggatcccccactcatggccgcgtctcctccatccgatgcttttgcgttgctaacctgccgtagtgaaggacgctttgtcaatcccggggttgatgaagcaacggcactttgggagcctggtcttgaagttcggactgctggtccagataccgagggccgtgagcctctagaggctgttggctgtgttggagagggacccggggggcttctggtgctgggagctagtcgtggtcgattagatgccactgtagaggtgcgggaagtactcccgatggacgggcggcccgtagtcgttgcgagttgtttcgttggggacttcgtaggggactaaattgagtagaatcataggttagcataatggaacggaacacctttgtaggacatgacatactcggagagcggctacacccttcggcaccggagtaggagttgaggctgcattgctgctctgtcgccttgctgctgtaggaggtagcccagtttgcttgcgcataccagtggagatcccaggtttaggctgcgctttgctacctgcggcgctgctagccagtttggcggtttgtttactctccggctcgggctggacaatcttaacaaccaccgttggacggacaaacatgccgtgtcctggatagcaatcgaaataccgttcgccttggactgcgccatcgtttttgccggtggcttcatctaattcaaggcctatccactgtccgtccgcaaaatgggtgttgccaatgaaacgcactgttgctagccgtccatcgggcagctcaatcaccgtgcctacagataaggcatggccagacatttcgagtggattcaagagctacaatgagctcttgagcgatagctgagaagttctggttgttgggaggacagaaacacggcaactcctgagtccaacggagcgcgtcaagtgactagtttctgcctcaggcagaaacttccggtttacgatgtagatcactacaatatagttactgagtacacgcattattgatccaaaatactgctaactaatggcttctccgttgtattattatagcaggcttgaatcttgatttcgttttgcattatccagagcccttcatgttgtacgtcctatataaataggcccataatcatatacattcatagttgtaaaccaaaagtctagtgggaataaacaaagagtgtcgtagccgggtctaaatctaagcatcaccgctttctcctcactgtttaaagaactggggaaaaagtaccgggagctcttggaggctagagatcgtgtgcttcgaagccggcttgtgtggtacgggggtcccttgttcgactaggtgaacggtagtccatccccgagcatgcgcatgtacgcaattcaggtgtgaatcatctgatacggccttattagcatgaagagtccaaaaggtccagacatgcagtggagagtgacataccaacaaaatagcactgatccgtgcttggagcaccagcttccttctccgctttggcgtacatgtcctgaccaggtttgcacaccaagggcaagattccatagtcacaataggtaataccttcgaacagatcctcaataccgagtaacttcaccacacgctttgcgtggttaatatatgcgttcgtgagcagccatggtttcacctttgttgtgtccagggtttccaacagtttgcgcagcttgggatcaggcttgaggatattgtcaagaggtagcgcatcatcaacctcgtagttgaaggcaagcgggtcgatcttgtggtggcgggtaaggccttcaatggccagtccatactccttgtagtatttctggtgtagcatatgggcatcttccggtgtaaggtcgagatgtttgacaaagaaaacatctagcacaagtttactatattagtaagatagtctagcacactatgttggcttcacttactgatcaatgcctgcatttcatcgtggatgttgcaagctgcgtagaggagcgctctgttattagtagctcatagagagcggaagtcaagagcaccaacatttagaatagagctgtaggagcacatagtaattagtggccacaatgttgaatttaacctctcttgacttacacaattgtcaatatcgaagaagaagaccggccgtgagtcactgactccgttggcagcgttggttgacatcgatcttaaattaggaaatcgcaagggtagataatcaggtgaaagtctagacgaggtcacgataggtctaataagccaacaggaagataacgcaaataaccgatgcataagtcaaagagaaagtaaagtaagatcggcttccacttcttactagcgccctcatgttcccggcagcaatccgcgaccttacataatcggatttagcgccctgacggccggcatggtggactttttacgacacttcatttgctcttctatccaatcctcggagccttctcaatcgtagattggactgagtggatatttgacgtgggttttacgcgtttttagacatatctgcttccagtctctctcatcttgttctagctttaccgatccctttccctagctttcccaatgaccatggccgcgactcatggaccaacaactcaccttccagcaggtcctatggctgtttcagcctctacactggatgatgaggtacgggagtacgaaaaaatcttagccatcaatgaccaagtcttctcgggcactcaccctcggctcaatgttccccagcacttggtgcgcaagcctgggagaaatgtccaaaatgtccctctccaaactcatttacctaaaaatccccctccgacagctgtattggcgaatacgcctgtggttacaaccacaaaacagccttacaatagctcgcagagtgccgcggccagaaacgccttgcctgcagcatcacaacccgcccgtgtggcttcaaaacctacatccgagatcgatcctatcttcttgaccaagtcggatgacctaatcagggcggaactacagttacaaaggcagagattggaaagagcgctgcgtgatcaagtggagtccaagaaacaagagaccaaacagagacctgcggttcaagacacgaagcccgactttgatgtctcggaggttttcaaacaagctcttgaggcagtgaaaccagtctcgctgagcgatgcatctgaggccagtggacctggcggtgctgccagtgattccttcgacgacaattcattttactccagtagagctcccgactcgcctccgcagactggcgggcaacataagtcatcccccgtggctgtaattgcacctacaggacctgccgcacgtggtccggtaacccattatgcagatgagttgcagcgacttgaagctctcaaccgtcctggatctgatcaggaaatgccagatgcttaccttgttgctgaccagcgtcaatcccattctcagaagcagggccgctaccataaagcagaggctcccgtcagccgcttccgcgattcgcatcggtccgagatagtggacgaacccgaatattctccaccagctccagcagtgccgccagcggatcatggcgaacatccccgtgggttagaaactggtgctggaagaacatctaggctagatgcgagataccccgaccgaacccgagatattcgcaagcccccgtctcccacaaacgtgaaggtagttcgaaaccacatcacatcaccggcagctccccggccatctcgggtgtcacctctggcaactgccaaggttccttctgttcagcaagtccgggatgaacgtccttctgaccaggtgtactcggaccttgattctgctcgtggcagtcccaacccaccggcatttcaggtcatgtcacggaaacggagaaggctgcgtgaaggcgatgaaggtccccgtcaaacgtcgcacaggacacaaaatgcagaacccgtggaggcatttatcaaagaggagcctgtttcaccgccaccattcgccgatgattctacggttgttcgcagccgaaaccctgcagagcgccccatctacattgacatcgcgtcccctcaatacactcctgtatatgaaactcgcggaccgctggtgcgagagccagtttacgagattgacccgtaccacgagcctctatcagacgttgggccccagcgcacaatatctcgtctgagcatcagacggccaattcgggaggaagctgatcttcgacgagtcgccagctcacagtatgctcggcaatcagactatgctcgtgagtacattgaggcccagccacgcccagttcgagcggcatcatatgtggtggaacgccctctgcaagagcggtcaaggtactacgaagatgcccctccttacacacagcatcgttatattgctgcggatgacatgctgccctcaacatatcgggaggcttactacgaagaggcaccgccggtgcggatgatggcacctcctcgacgtcggatcgtggttgatgagcatggcacccagtactacgagttgccacaggcaccaagactgcagccgatggcacccccgcccccgcccccaccccggccagtctctcggatgtcaaaagatgtttatgaagaaagagtgcaccaccatgcgggcagtgttcgtgcgccttcagttgtgcaagacccctacggtgaacgacactatgtgcaggaaatgcccccgccccagcctgtctacaggcgagtgacgtctgaatatgctcgtcccgtagcagccgatgagagacaaggctacgctgctcctttggaaggccatgaaccttactcacgcagcagcagtgtacaagtagcggagtacattcctcgtcatgcggtctatgttgatgagcgtggagtgccccaggagagaataattcggacagccagtgttcgtcctccacagcctcactatgaaaactcgcatgaggttgttcagcgagttgggagcgtgcgaccaactggcccaggccgcgagcccagtatcttcagggacagacaacttggggagtatgttgagagaccgtattacattcgggatcgacggtactatgaaggtgaaggcgaagagggagatcacatcgcgctggatggcgcgaatgatacgatccagcgaggcccacagcgttattaatagcgtgccatgcttgaactttttcttctatttgcgcagcatttcatgtctttgtatttaaatgtactattccatcaattcatactttacgcatcatactttacgcattatcactacgtaccagattcgtatatcagatatcttgaacccaaggaaatttgcacatcagagggtggcagttaagcatcttataatctcagtcaattcctcgtgcttgttgaatatattggtagtagcagtcatatccacaaatcctcgtcggacattgttcttgttgcagctctgatctgcaaataaactgccaatctgttgtgtaaggagagaatccaagtggtagattgattttgctggatcatctagcttcggggacttgtgttcctctcacatcagatggctagatattttcaacattctgagtatcagaaacaaagcctttatcatcatttgagagttctgaatcaagtattccctgagggctgaaagtggatgtatggaagcatatcaggatatttcaagatttggagcgctcaaaaattctgcgggctatgcttgtaccttgtaatatttcttgttagcctgccatattcaattaaagtcgctgaattcaagtatcattcaaggaagaaaaaaaagaaacaatgaaatagcctaggctgcttccacctcgatcagattgagattaagtttgttcacgtggacttttcaacttcgcctaaatttatcatcatgtgcaagtaaagtagtggagtatggttgtgttgaaaacgaattatatatagtacctactagaatgatagttgtcgagagacaatgtgttcgagctttcgagaaacgaggcatgcaagacgcaatcctgcaacttctagcccgtgctaggtcggtctgatatacctgaatagaatactatcgtgattagctagtgatctctttctttgtcatgggagtagtatggcaagtgcatcatgattagtgacagcttgtatcggagtaattttgtatgacatggtaggttccatacacgatcatccgaattatcatcatcacttgcaatcattgcaataatcagccattgtgtgggagggcttaggattgataccttgttttgatgtgaaccaggtcacgatgaagaaggctgccagagtatctgggatgtcccattccgcaggcatatgaatagatgaggatggggtccaagaggaccagagggttggtccctactggcctctgttgccgtgtggatatttctcactgtattcgatgtaaacttgacttaaggaaccaggttatagaggaatggaattctgtcaaagcaaaagacccagattagctagttgtaggagtcaaatggggactatactggcccagtaaatttcaggcacatattgattttaatttaccactcacatctcgcatcagagtgacaacttcttcgtcatgtaactcggtccattcccgttgatcgtcatttgcaagagggcatattgagacagacgagggtcacgtccaagggtcataagccatgcacaggagtgaacttactacagggcagtatgtagcatctaaatgtgttgtgggtagtctatcgagatggtcagaacctttggccttgaccgtcattaagccactgatagaccgaattggggagagagttagttgatgaaggaagatgcagggtgttcgaagataggttgtaaggagaaagaggtaaacagaaagagaaacaatataggtaggtatggaaagctcttgctttgtttgcccactccaaacaggtcatacacacacagcaccattactgctattttctatctcaccccaattataattcattttgtaatcttattgacagtaaggttgccgcttcaggtagagatcggctcccggagcacagcctgagtactccttgagcacgccctgattcctactatgtgttgattataatggtgtagctctcttggtggggattgggaagtagagtgttgctgggcttataccctgtcgaagaatatgattatgttatctagagtggttgttgatatatgtatgatccaattgttgtattacttgacttagatatatattcctcaagtgaaatccattggatatcgcattcgtatgtgtcaattattgctccaagaatagaagagaatttcaaagttgtcatattcatgtattgtaggttctatgtgagcgaactagccaaagtcctcggacggtataaaagatagtgtccggctgtataaagatagtgtccggttgtagtacttatgcccactcatccctactcagcaaggcatcattagaccagcaaggcatcattagaccagcaaggcatcattagaccagcaaggcatcattagaccagtctccattccctctccgttatctccctgagggacagcaggaccgcagacgacggcacgaacagcccgatcgtctgattgcgcacaagcccaagactaaccaactgcccggcccactgccagccgcccatagcgtagcacggcatgaagacaccagccccagagtcgccagtgccgcaaactggctctgtggcctcactcagcgggtatagcgtcagcaaacgggccaccattaccgtcgggtccgacatgtcggaactatcagcagtgcgggcacggaacatcttcgactcgaacgggccgacacgtccggcgctgcacccggtgcgcgccccgtccttgtaaacgatcgcgccggcatccggatcggctggtcctactatgtggtgcagattgaatgtggctggtggacgtggcgcctctttcgtgacactcaagagctctgtcataacgtctgtcccccgactgttaaaccacctcccattatggcactcccatccgtctgcaaggcgtacaagggctaagtcgctccgccagccctgactattgaccccgatatcgccatggaccacagtgccacatggctccacccatgccgataatagacgcgcgcgactctgactgtctgcctcagaaacggttttgaacaactcactcaggatgtcaagccctccgggcgttatcacctgggtttgtttcttctctaaatatggtagtacatgatacgctgtgagggcatatttttccccgtcatcattgttgctggtaggggcgagaaacaccccaacagaacccttggactcctccttctgtagcgagatcgattgaccatggctaaggcggcctgggtgttgcggagggcgcaacatcaagttcttgcgtaacacaaagctgcgctggctcgcctcccagctttccagtccagcgagtcccaggatatcttcggcatcggctgccgggccggccatctcgcggatctgagcattgagcacaattgtgggcgtatcctggtcggggaggaccgcgagtagcgcggccgtctcgtcggcgctaacgtgaaggcagacgcactcgatccacagcctcttccagccgaacgggcaccgggtggcgagcacggtatgaacagtgcggtcacggcgtagtagattctcgatgtaggttaggtcgtcgtctagagggcgtaccggcccgcgagtcatcgatgggagcatcgggagcatatccggatcgcaaacaacttcttccgggaggggctccctacgctgtgtcatcatgtccagccaggtgtcctctgtatcaaccagtcgctgattgtatccccgcgggccgtcgaggatggccatggagcgccagagattgggctctcgatatgttggttgttgcgggaagacctgcaggccccagcggagcaaagaggtcatcgtctcctggtagagcagaagagatatcgaatcgataggctcggggtgtgggcagagatcggacagtggtaggacaatggtgccatcatcgagcgttgcggcgctgccttctgccagggcacggattgccatcagcacggtctcgggcgttcgggatgatagaatggtgcggatcttctctgcaaactcgcgaaagactgttggcgtggtcatcttctcccgttttacgtgtggcgtccagggagagtgtgcccatttgccatttgccgttaggctttgtgggtgtggttgcccgcgaggtgattaatgctcagcgttatgatgatagatgactccagtacgggcttcttgggcaacgatcaggggcaggggggtagtagcatatacttacagcggtcacagcggggaatatctaagttactgtggttgtggaaggcaggagtcgcaggactctacaggaaggcacgatcaacaaatgaaatcggctgggctgcatgtacggtacgagccacaggagcgatctatggcaccagcgatacaaacagtaataatttactggctcactatacaatgatcagcgagctgctcttgatcgcgcactttaggctcatgtcgatatggatggaggtggagtctctatggaactcaacgtcagtccgagtcccgactcccgcccgccgattcccacctcgacatcaaaacccgtattaccctgtgtattacccaggggtactgtatagcggccccaggatcacttcaagttcctacctaggattggctatttccaaagattgttatataaaaattatgcaatagaaagtttctggtagagaaagaatctctgtaagttgtcaaactgatttcggtcctccctgtaacttgaaatagttacagtcagtggacatatgtttttacacccctagccccactcccctatgattatataatatactgccggtcgaaaacccccatgagttcatactgtaggatcttgtacttcgcattttaggtaggcggtatactaatatggtggcggtgaactgggtggggcattaagggtgtagaaacttatgtccagtcactgtattttctttcgtaatgtaattacagaacttttgtccaacatgctcagccacgctgtaaacagatacgccacaatacccgaagcactgctccctgaccgaaaaagtgggccaaccgtatcacgtgcctcaatgatgactcagcctccggtaaaaagggctccaaaaacagcgtcccaggtagctattttcagagcccaatttaccgtcaactagcattggggtgaaatgaggtattgagaacttatactggtccttgattttctatatagtagtagcaaatggcaggatatagccatgctagatattgttgtagttgtggttgggtttaggtatcgccttgccgcagaaaacaataaatttgcagtggaaacttcctttctactgtgttaatattccaatcagcgtctgcatttgcctggccttagtgctttgacaacatagcctgccatcttgggtccaacttgtttagtagtatcaatgctctatcgtatcttagggtcactacaacaattgaacaattaatctagaagacccttcgatatgactaccctcgagacactagagcttattaacattacgggcatcattaaatggacctaggcacaatttgcaatggttcaggagtaacgggtgttcatcatcaacgctcatgtagggacatgaattccgaatttggtattttatagcaagttgaaatagttgtggtgcaatcagcaacgtctcactcctttgcagttattcttatcgggaaatttcatgaattcaggcttgaattgacggatttcgctattaatagcatgtgttgttaggaaaattgacatatttggacactatcaataatgctgatgcttgagacgtttgtttttgacatagttaacggcttacagcaatcgttgtagtttaccgatgtagtcgaagtaccacgtgtgaagtatatagttctgcggttgaaaagtatatcaactagtaacgatccgcctaggctatcgatactacactctgtggaatagaaaaaggtactgtgctagagattatgttctgaataattcctgatggtgaagtggcaaaagtcgtagttatatatcacgcggtcaagtggataagccccgtacggagtgccaactttacatttccgactttctttgtccgaggaaaagaaacagttcaaatcttcacaagcttattttaactatacaccaattaatagcctcattatcttgaagcttgctctaaagccaaggccaatgtgataagttctctctgactttgaaaccgaggacgggatgcagtctgattttcaaaaccaacggtccagtcggaattgtcgagtcctttggagagctgaagaagtgacccactactgcctgtacgagaagatgacgtctaccatttgaggggaagttattccacctgggtaatagttccagtccccagttcattgcagaaaatacgcatagcattgcatatcattgcataggatttgtgtttggatgtatcggaagcgcaacagtttgtcccccggcgccgtggagcccgaacatgtcagagatcagaagcgatcagaatccagctaaggtatcagcggtatgatcaacctttagctccacatgcctgaccacctgggcaggcttgacccctcagttttcccagcgtccggtccagccggtgggcagtgataggcgtcctatcaccacctgtagaccagtggattaggatacggcggcatacagggttctctgtcccggagcctatgaaaggatcaacctgtgtatgctaggtacggtacggaatgactcggatcccgaagtacctgaggcctgtcaaagcgcgtagaagggcactttactgtaggatctcatcactttcacatacccacgtgatagtaagacaaagccggtatgagacacggtttccagggactcaagttcgagataccttgcgatattggccaggtggtttatgcctgtatcgggtactaacaatggctggattccatttgccaagaagacccttgcgaatagacattcaagatcctgcattctcgattgatgacaatgtggattcgagaaagagatatcaagttaaagaccctttgagacccttccctagctaatgtcttaaggtctcgagtaaaaagggcatataaatcgaaaactgcaaaatcaagtagaagacccgcaaggactgaccagacctatttttttcccctattgtttttgttaggcttccttttcctttcctagtttctttttatattaagatatatacacatattgtatatttgtatatttattctgatcgcattcgcttttgttctcatatcgtatttagaggcgttggttggccccatcgatcttcgtttccaccattcccgggtcgaatcgcccacacaggtcattcccatccctgtcgagaacggcctgattccttcccacatctcccccccccccccccccacnnnnnnnnnnnnnnnnnnnnnnnnnnnnnnnnnnnnnnnnnnnnnnnnnnnnnnnnnnnnnnnnnnnnnnnnnnnnnnnnnnnnnnnnnnnnnnnnnnnnnnnnnnnnnnnnnnnncccccccccccccccccccaacccaatccatccactctctccctctatcccctcgactcgctcaaggggttagagatttctctaactagtcatgcacaagatatccaacttcacgggccaagcccgtcatggttgggaacgaatgacgccgactttcgggatgtccagacctcacaccgatatggcttttcgccgaccacacggtgcgccgcccatgacaccgccgaccagcatcgatcccacagtcaatctgtccttcaacgttccgttctcgtccacactagccggccccgatgtcgaagatgtgctccacgccagccccggtgccctccagcgctggactttcccggaaggcacactggagggcacatcggtgcatcagcttcccgtccacacaaataatgtcgaaggcttgcagagattatgtcggaagatcacggaagagaaaggaggacgggtggaagctacactcacaacctccgaggccaaggctgtgccctcgctacaacgccggccgaatggcttggtgaccaacgtctgtgtcacaggagatggagatatggcacgcaagatgcgggcgagaatcttgaatgagaccccgatcatgctggtacgtgaacgaatttttttggttccggcgccagcagtattttcatgtccacggacatcccttgctaacatcggaccgttcgctagcgatgtgccactgtcgatgtggatatgcatctgattatagatggatcgccaaagggaatcagagctagcgtccttgagcacctggacactttagccgcctacaccggagccgatattttcctactgactcccaaactccatgatgcggatagtgcggtagtttcgtcatatggctatgcgtcggataatggcttggaacagcgcttcagggttgccatttacggtgatttggagagctcggaacatgccaaaacccgggttctgatcatgattgaccaaatagtacgtctttgtgtgtgcgtcgtgaggcaggcgaactgaccagaaaccagctcaaacgccacgtggatgccatcaaactggactcgactatgcacaccttggtctgtggtcgcactcgcaagaacatcaagctcatcgaggctgctacaggcaccgccatttacttccctccacctttcccgcaaattttcggctacataccccccggtgcgaatcgtcgaagcgaggatgaggtttacattacaggtgagacgcccgaacagattgctcgcgccaagcagaagctgcgagaactagtgatgggagtcaagatttttgtcaaggatgtggttgtcagctcaagcaaaatcgacaatatcttactcgatcgtctggataaggtccggaaggtgatggaaatgaacggctcttatgttcttttcccgcagcttggtagccaacgcgggcttgttcggattcaaggaaccgaggtgttgcacgttgagcggacagttcgggaaatcatggctctggtgcgtcgctttgtggtttttggtggaatgatttgctaatatttggatgtacaggctggtcaattctatagtgcctcgtggtggattatcatgcccgaccccgcccaaggtggtctccgtgctccctcaactgccgatattcgctccatgctatcggatatctgtaccaattcggaagcggaggttagctttgacaatctgactttcacaatcaacggttccgatgatgcagtcaaggctgctatgtcagtcatcaaccagatcccattcgtgatgcgaagtcaataccagatgagggtgaagatcgagttagccaacgagcacaaggagtttgttagtggcaagaagaacggaaagatcaacaagatcatgggtcagagtgagtctcaccggacatctacctgtaacacgagatactgattggcacccaggcaatgtccagatcatcttcgatgggttcaacgagtacaacttctatatcgatgtgtgcggcaaccagtatgaatcgaccaagaatggcttggacttggttgagcaggagatgcctgcatcgatctcgttccacgtgcctgaccaatatcacaagcggatcatcggaattggtggacagcatatccagcgtatcatgaagaagtactctgtcttcgtgaagttctccaatgcaatggaccgcggtggcatgggcaaggaggatgacgacatcaaggttgacaacgtgatctgtcggacccctgctcgcaacgctcagagtctggaccttgtcaagcaggagattatggacatggtcgagaaagttgtaagtgcttacagtggccaaagctttgatctcatgatggaaacttacgatttgcaggatgccgaatacgtcgccgagagagtcgtcatcaatcgcttataccatcgtgagctattggcacgtatgcctgagattgaagagctggagaagaaatggaactgcaagatcgagttcccaagcactgagcttgccagtgacgttgtcactatctccggccctgagtatcaggtcccccaagcggtcgacgcattgcttggcatggtgcctgagagccatgagcttcacttccagagctcggctgaactccaggaatactttaagtgctccgatttcctcgccgatgttcggaccaagctcaaggagcagtacgaggtcgatatcaacgtggatgtcggtaccgatcttcctactactcaggaggaaggctcctcgtctcccacccccgggcctgaagaccgtgtggtcctcggatacacgcgcaacaacgccggtggcctaaaggacgccattgacttcttgatctcccgtcttgttgcacatggactggacgcaaacaccgtcaagggagctatcccgcgccccaagtccgactcgttcgaagagtcgctgcccttcttcgactcaaaactcctgcagcacgcaccagtgcccctctcgaccgactcgcccactcggccgaacttctccgatgagagcagcgaacgaggctcgattttcgagcgcctccgcaagcccggaagcatctcgtccttctcctcgttcatcggccgcaagaatcactccgcctcaccggggtcgttcttcaaacacgcctcgagcaacgcctccaaggcctcactcgtatccatggagtcacgcgatagcggctaccgcaacccatggaacgattctggcgtgaacctccccgaagacgacgtgcacgtcctggggagctcgcacagccacaagagcagtaatagcaatggctggcccacacgcttcgacaccaagtttcccttcggcaccgcgccgggtgacatgacgccaaagcatgacccgcgtacttcttatgatagtggtcgtcctagcacttccaattctacttctggatacccggccccaattgggccaccgcgttaaaacaaaaatatccatttgcagcagtatacccttttttttggttgagttgtttttgtctgtctttttctgcaattattttcattcccagcgtgttttttccggttctctttttgttggtcttcttgttgattgataccacggaacgcaagcaatgaaggcgtcagaaaagaaagagatatccaagatctgcgtgcgatagagcagggagaatggtcttgaccatatcctgcctctttttgtcttttttttttcttttttttttttcgcgatgcgcattcggaggaaatgacgggactggatagtctgaatttgatgataccagggccatctggcctcgacttcagaggagttttccgacaagttggggttttatgttgatgttttactcttttgatatcccccaatcatcaatgagattttgccattagaagacattctccaatctaagttgttatgatggaagctgctatacttgatgttctatcatcacatatagatgtaagtacctgaattcttcaatatgcttctcatagatagcttcgagtgacatcgatacctcggtatgcccccgtggcgagtgacgttatacgcggggtcgaagtcaaagcacctctccacacccccaatcatcaagttacaactcccaagagaccatacaatcctattgaaacacacagctaaacacctagaacacctaaaatgacagcatcctaccctcgcccggacttccaacgcacttctctaaactggaacaccctaaatggtccctggacctccaccttcgacgacaaagacgaaggcctaatctcacaatggcaaaagaccagcctggaaggaataccttcccaccagataacagttccatacgccttccaaaccccagcctcgggggtaaacctcatcgaagcgcacgaggtaatgtggtacgagcggcgcatcatagacatccgcacagccaatgaaaagcaaaaaggcaatagactactcctccgcttcggcgctgtcgattatgagtgctctgtctgggtggacggcgtcctcgtcggcggacaccgtggcggtcatgtgccattcgatatagatatctcggacgtcatcgccgacggcgctacagaagcccgtctcactctccgggctagagactcgccttatgacatgacccagctgcgtggcaagcagttctggggccctgttccggaaagtatcttctacacgcctaccggcggcatctggcaatctgtttggttggagagcgtcccggctatgcggctgctatgtgggagtggagggacggtgattcgttctgatgatattgagggcgggaagttacatgcaaaggttcaagttgccggacgccgcgttggaagtgcggcgaaggtcgaggttgaggtttcacttggggggctaggtattgcaaaggtgcacggcgagctgccgcgggataaaaccttcgttgcgcttgatttgagtatgacggttactgaagctgtggtggcacagctgaagacgaagaatcagaagctgttcggtgttgatggagtctggagtcggggtgtcgcgctctgggctccggagcatcctgttctctatgatattacgcttcgcctgtttgatggggccgggggtcttgtcgatgaagtccagactacgaccggcatgcgcagtctaaactggcaaaatggcgatggaacgttccagctgaatgggaagccgtatttccagatgttattcctggaccagggctactggcccgaaacgggcttgacacctccgtcttcagaggccttgaagacggacatcgagctagcgcagaaactaggcttcaatggatgccgcaagcaccagaaagtcgaagatccgcgcttctactactgggcggaccggatgggcttcctcgtctggggcgagatggcaaatgcctacgagttcgacactgactacgttgagcggtttaccagcgagtggatcgaagccgtgaagagggatatcaaccacccatcgctgatcacctggacaccacttaatgagtcgtggggtgtatccgatttgaaacacaatgtcgagcagcgcaaccacgttcgcgctctgtatttcatgaccaagtatggcccacccgatttagagaaaatggatgaactagctaatacaaaaaaacagagtcctcgatcctagcagaccaatcaacgacaactgcggctgggaacacgtccaaacagacctaacaaccttccacgactacggcgactcaaccgacctaggcgccgcatgcgccaccatgacagcgatcctcgagctgaaaggtggacatgaggtcttcaccaaaccaatatccttatacgccggctctctgatcgtcgacaaaggcgctcagcatacgcccggcgcaccggtgatctgctctgaattcggcggtgttaacatcgcaccacctaaggactctcctgccgccggggagcgggactgggggtatacgactgcgaccgacccggcagacttcttggtgcgatttaagaagctggttatggcagttgtgcaaccggggcatatttgtgggcttgtctggacccagctgtatgttgcattcgtcgttcctggcctttggatttgggacctgggaatttgtgctaacatatttccttttacttcgatctaggtgtgatgtcgagcaggaggtgaatggcctgtacaccttcgatcgcgaggagaaggttcccgcagagaaggtgaaggagattatggatgctgcgaaggatcactactaccgtcataccacttctcactcgaaggggtttaggaagctactggatcagactaagcattttgtgaatctttaggtcgtgcaatgctcattgtggatttgagggatatccagtgagcggcatcgtacctcttaagaccgtagttatcagcaagaggccatcatgttgaagctatctgaagatcagagatatattataggttcatgcggtgtcgggctacctagttccaccctaaattcttcgtataattgatgaatgaacaaaagaacatctaaaagtgatttaaaatacaaattgcccatgtagtgatgtgatcggatgatctctaagaattgcggccagcagtggatatacccgaagtgtcgctggataaaaagtgccacagaaaatactataacggatatgacgttgatccaattctatattgaagggtgaagatatagcgctttgtcgatacccaagcactcgatatattctggaacgcaggacactgtgagacctagtcaagataagtccgcgatgcaagatttaaaaaacaaaaggcccgaaaatactattgaacatcaccaaaatatatattattgtcactgggcgctagacgaaaagatcccattaagtaaagactgaagagcaaaatagcccaaagatcaattcgctggatgctgtactcgaaaaaaaaaacaaccaaaccccatagaaacgccggagatgccaagaccccatatcaggcgagataaagaaacgtgctagatggatgtgaatgcgggatgcagaatgaatgcatattacaagtaaaaaatttacatgttagccaattcctggtcgatctgtcggtccaggaaggctcgcttgtcgcccgtgagcgaggtttgcaggcggtgttcgacaagaacgcggactgttgggtcatggttagcgaactgtatgattatcatagaaattaaggtaggaacttaccctgttttttggtgacagtgtctagatcaacctcggccaaacagccgcggattgcctcggtgatagcaccctcatcgggcccactggcagaacggaaatcaaaggcggtgctggcgggtcgagaggggtactggggcagggggctgcgcgagccagcattgccgaggaggttctcgctactctgcatcatgccgacgctgtgtctgctcgaggccatcgggttgtcttggtaggcactgaggccacccatggacatgtgccgagaagcctgggcagagtggccgcccatgcgagggctcatctgcggcagatcagtgtagcgggagaagttcgacatgtgcgagttgcggtttccggggacgttgccgccgacgaagggtgcgggagactgtgggggcatgtaggggtggttgcggccctggcctgggaacccggtgagaatggtggaggctggcttgacggatgagtactgcgagtgcatgtcatccatctccatagccatttcgtcataccggccggtggcgtagaccttctcctggctggcactgacctcgccgcggcggccggggaggttattggccatggcgtagtcatcccagcgctggagagggatgctgcgtggatcgaagggctcatcttccacggcgatgacacgcttgtcgcccttctcgccgatgacaatacgggtggtaccccatgtgaaatcgtcctgtttccagaaggcatacaacggcaagacgaaattgtagatcgggtacgcaagaaggtagatgatcatccatccgatgtgttgccactgccgtttgacaatgaagatgatcgcttgcagaccatatacaccagccagcatgataatcgagatcatagggaagggacccgtgttgctggcaactcggtagatcaggtaggtgaggtacacgcaggtcgcaggaagaatgagagttcccaccagatcgacgagaacgacgaaacgcatactgaaacagcagaaaccgcagagatcttccagagctgccagttccaccaggttgtggattgtggagttgatccaacgacgtctctgcgacataaggacactccaggtatcgggggcggctgtgctcgcgtaggcatctggaataaacttgtacgacatggctgggaagtgcttggtcatgatggttgttaggtaccgatcctcgccaagagataagaggttcttcttgtggagggtgtcaacatcattgtcagcgtaatcgtgaatgactttgtccgagataataagaggacgtcctttgtccgcagttcgaaggcggtacatggtgaaactaggtattgttagtatcacttatttccgagaaagcatataggaacgtaccatccaggaagacaagtaacactgccgaagagcgactcaaatgccttggccaggtgatgcgagatatagtattcgtaaacctgaatcatggtccaccaactacgttcctcgttctgaagactagtctcgccgcaaatgccagcgatcttggcatctgctgcacatgctgcgaccaagcgattcagagaatcctccttgacggtggtatctgcgtcgaccatgagacagtattcatatagctcgggatccacaccgatgacgttgttgatttggtggaacatttccagttcaaggggggacataggtgagcgatggtgaacacggttcaagaactgcatgagaaggacctgcgtgtctcgcttgccacgattgccgggtttggacttgcgctgctcggattccttgccaaccttgacgaccacaatgtagggcacgacattgccttcgtactcatagagtccagagtaaaccttgccgtagttcagctgctcacttccctgaccgagagatttgcatggcagtgccggtgggtccatcttaggatcaaccccgagaatgtccagaacgatctttggggtggggcggtcatttccgccaccaacaatcataccatcacagatgacaaagatcagctttctcttgttgtcgtactgcaaggcagtcagagaatcaagacctttcctcagatcgttctcgccctcagtgtatgcggggaccatgcagatgacaaatttgtcctgaggcgtgggccgacgtttggaccccagctgcagagctgccaggaatttgaccagaatgacagcgcagataagaatggtaaaggtgagcaggatccaattattgacagtgcatcgtgcactttcacggaaatcaactttgccgacatagaagacaaagtcgagacatgtctgagcatttttgaaatctgtcgtgtcctcccatttgtcagtgacgtcttcgcccatgttgtccttgaagagagcagtcagagtcgagggtagccaatcgtatgtgtcgagattgttcatcgtgctcagtgtatagaagtaatctgtcaagtcatacaccttttgatccttgataacccagtagcgagaatcagcgtcggcctgcttcttgatggtatcccttgtccaaaccaggtcacccttgtagtatgtaccaatctttggcaagaatttcttttcataccaggtagacttgtggagtgctgaggtggtgcttgttgcttgtgcccccgatttgtgctcggccgtagaaagggcgatggcggatgtgtcgttgtgctgcaaagcgagtgtatcggatgtaacaaatgaggaacaataacgattgaggggagggggaaagtaggcatctaaaatctctcctccaaattgttccatgttcgtcgaggatgttgtttctccagtaatgtcactgtgttgtgtgcgccagaacttgctgatgtcgtagacacggccgtggatgccgacgtaaaagttattgtcagttgtgtgccagctgacttccttcttattccagactttgtccttgttgggacagagaaggtcaccaaacgcaatgatatagaagcaaacaattgcattgaaaagcagaatcaaaaacacaaggacgagcttttctcgccaggccaggcggacatccgggcgtttcatgcggccaatgtatcggagcacgaaggaaggaatccagaaagtcagcgcccagacaaaaccagtccagagccggcggcccaaggtgatggtcttcttctcgatgtgctttggatcaccaaactcagggtcgaattcgccgacgtaccggccatactcgtcgtagtacgcaatgtctccttttttgtcgtcacctttccggcccaaaccgtagtcaccggtattaacagcgttggcgaatggcgcactgggggcgatggacttggcaccgtcaatcacactgggggcgatggcgccgctaggtggcatgctaagaagattggaattctcatggatgggagtgccatctggggtgaaggcggtctcatacaacgcagggccgtacatgaatggattcacctgagtttcctctggcttgagatccagcatactttccgcttcccaccatgccccctcgcgcatccatacgcgctgttcaccgacgacggcgtcgccgttgctccagcctctctcaatgatccagttctcaacaccgtcctggccttcggtgcaaccaagtcgcgcatatcgactgacaaactcttccacgtcgaaatcggcggtgaaatcgagttgcttcaaacgacgattggcccattccggcagtcgccagtcccgcagttggcgggagactgcaccagcagaccacgctgtaggtcccaatgacacgagctgctccggcatatcatcagtcggatggatggagaggtggtaccagacacggctgctgttgagcgtgttggcaagatcgaatcggccacgctttcccacggagataccttcggtatcattggggaacagaacgcgtctgagaaaagcgtcaatctcaagttcaacaccaaccttttccaataccccctgccgcttgtcgagatcatgttcgcgttcccgcccggcaaggcctgtcatgatattgagatctggttcgacttgagctactgcagagttcatttcactgatgatggaagctccaataggcggaaggggaattccatcgtccttcatttcagcattgagaccaagagcatcatcgaagatgcctctcatcatgatcgctttaccgagagccggtcgtggaatatcgattacagtcaggttgactgtatcgtccgttgaccattgtgctgcaccacccccgttgctagaatcgttttccaatgcaatctgaatgtcggctgcgatagcttcatttgctttgctgatgacccaatcgaccagagcttcgtagagtccggcgatcaaaacctctcgctcatcagtggaacatttatgaagaaggatttctggatcaattcccaggagacctccagcatcctcacagacctcttccaggtcttcttggtccacctcgaacccgactgcgttgccgagcttaagaagaccagcaagggccgatagcaagcctcgctgggcagcacctttgataccaatggatttcaaagaagcacggaagtcttctgcagcggcagcatcatcggctgtgggtagatagtgtggaggattatatgtgtttgatcggttgagcaaggtatattcggcggggtctttcaagtccaaaaattcccgctccgcagctgtcgatgtcgatgttaggagataatagaaggcatcaaatgcacggtagccggtctcgggctggatgtctaaaagacccttgcgcacattgataccggaagtggacaaggcgaaggagaggccgacgacagatccttgcaaagataagttgaaagtggcggccaatgccgaatggagagaataggaggggttgaacgaggtgactgcagtaaggaaaggtcgtatagcggatagggcgatcagagctacctcgggtgtttccactgggatcgctgcgatgaagggttcgagcaacgagggcgtggattgatggagggcgctattcgatattagcacgtatggtcttcggatcgatgcagtgttaaacataccctagaacaacggagccatcctcagctcggcgtcgagcatgttcccaagctctgatagccagatcacggtcgacggtggcacccgttcgcccatcgggtaaagtggttgctgcggtcacccatgtatttacaaccaaactcgtggcggagtctagttgatatggttgccccgcggtataaaacgaatggagggcattcagtaacgttgttgttgagacctgagctccatgttggggtctgggtccgactgagagacctgtcgactgcgtggagaagaccgaataacggttcgacatgacgaatgtgaggtcggagggtcaacaatgttgaccgcaagatgcgatgtccggcctgttcgttatcaaaatcgcatgagggtactcttttttttgtgttggtcgtttgtctcgctaaatgtacaagagtggacgtgtagaggttgtaagagagttggatttagggtaggtcagggttgcacgatccaggaattggataattgagcgagtgactggagacggaactcctgaatgagtgagaaagaagacaaaacaaccgagaagatggcgtggggagaaagaaacccatggagtttgaaaattacggggtatggaaaaataccgtcgatcctgacgatcgtctcgaccctgtccaatctggcagttaagcttttgacatttcgtccaatgttctccctgaacagtcaaaacacacgcaattcaagtttctggttgatttgcaatgttcacatggcccaggttggattggaacctggtatctgacagtttcccccctgtaattttgaaaccataacatgtttgttgctctttcaccctaacgggtccctgatgggtccctgatggcttctgcttgataagttccgaccaatcagaagccacccgagcagacagcgaccctgggacccagaactccgtcgatggcgtattgtcatttgcgtacggctgtatgtatttaattgtattaatagtacctgaccttcgtatggcacatgtggctgctatatttgggatgtctcacacttaactccgtacagatgaccagtttcgccacacaatggacggagtatgatcggagacttgatatccactgtgctacctgtcctagcctggctactggtctattcgcgagaatgtcgaaccactctatcttttctcttctctagtgatgtattttctagaaccccctagttgccctagtttcagtctctatccattgtcttttgcctcttttcacggtttttgatatgcaggtctattgcaagggggttgatcttggcaaagaatatggggagttgacgtgttccagggacctggaccctgtacggaccaaactaagtgctatctacaagatacgtactccgtagtacaacctgtatgtactccgtagctctgtaacagctggagtggagatcgctagatattaaaaagatccaaaactggttctgcttcacgtattgttttgtttttgtttttgttttgtttttctctctcgctaagctatattgcagtatctctagctcttatatcatgtctcattctgtaatattgtgggaacactatcagctatggtggattccacccgagacacgtccaatgaagccgaaccgaattaaatatcggaccatccctaaatagccccccagttgatcggtatggccgaggtttacctattcttagcgaccgagctagtaatttgtgttgtatgccgtattgcacaataccgcatccacccccgacctcttatcgatttgttgctttttttccctttgtgatcttccattctgggcttctggcttctggtttctgtttctgttcctgcttctgcttcaatttttgtctctcagccgcttgtcatcctatacgcttcccattgcacctcaaattataacctagtcgaatcttcctccctaggcaccccgatgtgtacgatctcggtctgttgctaggggtctttattccgccaagtccacaaggcattccgattcgcctcgctccacgttcattccgtcactggagacttcttaagccactcgctctgtgaatatttgacgtcccaattgcccttcgcacactcgttcacgccctcggatctcatcccgaggagactcaaatatggccaacgcctattctgggagtggcccggcacacgctcagccctcactcccctcattaccagcccacctacagtctgatacacatctcacggcccatctcgccagtcggtatgaagatccgaccctgttcattacaacctcggcatagctaacgtgtgtttcaggtttcatgtgggattacctactgcccacctgtcatcccaggccctaatttctctgaatacatattcatcggcgattaaaggacccgatggcgggaaagagggaagtgctgccggcgaggctgaagatctcgcgcgccgtgccttcactcgtctcggtgcgcgtggtgagaaccaagccgttgtattcttgtaagctgaatccactctctgcatagaaacatatctaacagtcattcaagaggagagagcggatccggaaaaaccaccattcgctcgcacttattgtcttcgtttttatccttctcatcgaccccgctctcctctaaaatctcatatgccgcctttgtattcgacactctaacaaccaccaaatctgtcactacacccaccgcctcaaaagctggtctcttccttgagcttcaatacgatgcatcatcctccgtgaaccccaccttgattggtggtaagatcattgaccaccgattggagcgaagccgcatctcctccgtgcccacgggagagcgaagcttccacgtgctgtactatttgctagcaggaacaagtgcggcagagaaggcacacttgggatttgagaatagcatccatgttcaaactggtaacaggctgtccggatcacatgttagccacaagcgctggcgctatctcggtcatccaactcagctcaaggtcggaattaatgatacggagggcttccaacacttcaaaaccgcgctgcggaagttggaattttccagaggggaaatcgccgagatctgccagatcctggccagtatccttcacattggacagctcgaattcgccacgggtcagtctaccaccacaggtgcggaagaaagtggcggctattctcacgagggtggtgagactgttacggtggtgaagaacaaggatgtcctcgacaatgtcgctgcattcttgggtctcagtgtcgatactctggaaaatagccttggttaccggacgaagacgatccaccgcgagcgcgtgacggttatgctggacccgaagggagcgcgagagaatgctgacgcattcgcacgtactatctattctctcttagtgacctacgtcattgaggccgtgaaccaaaggctctgtgcagctgaggacagtgttgccaacaccatttctatcgttgatttccccggttttgctcaagccccctccacagggtctaccctagatcagcttctcagcaatgccgcaactgaatcgctttacaactactgccttcagtcgttcttcgaccacaaagcagatatcctggaccgtgaggaaatcacagtagccgcgacaagctatttcgataacacggacaccgtgcgtggtctgctgaagcatggcaacggtctgttgagtatcctagatgatcaaacccggcgtggaagatctgatgcacagttccttgaaagcgtgcgaaagcgcttcgagaacaagaaccccgccatctcggtaggtggcaccagcggatcaggtgcctatatgtcccagacccgcagtgcgttcaccgtcaagcatttcgccggcgaggtggattattccaccatcggcctgcttgaggagaatggagaagtaatctcgggagatttgatgaacgtgatgcgctccacccggagtgactttgtgcgtgaattgttccaccaggaagctctgcagaccatatcccacccgcaagaaaagactgccatcatgcaggctcaggtgagctctaaaccactgcggatgcctagcatggctagacgcaagaccggaccaccctcccgtttcgctgccccaagcgctcaccccgaaagtgaggaaggcgatgaccaagaaagccaagttgcaggatccaagcgagccagcggtcggaagagcggaatgcctggaccgactcaaggagccgccggtcaattccttgctggtctggagatcatgaacaaatgcttgagctcctcgaacctcaatccctacttcgtcatctgtctcaagcccaatgatcgtcgcattgccaaccaattcgacagcaagtgtgtgcggatgcaggtccaaacattcggtatcgctgaaatcagctcccgtctgcggaacgccgattacagtgtcttccttccgttcggagagttccttggcctcgctgacatcgggaacattgtggtcggcagcgatcgtgaaaagtccgaggttgttctcgacgaaaaacgatggcctggtaacgaagctcgtgtcggtagcaccggcgttttcttgagcgaacgatgctgggcagatatcgccaaagtgggcgagcgcgtggtaccatcctatgcaaatgccggtgctgatgaagtcgatggcttccaggccgccggtggaaacccagactccaaactccgacttcttcacgccaccgaccagtctccgggtacttttatttatggagatgatcccaaacaaggctatttcggtagccgcgaactggatggacgctctgatgccggaggttccgccttcaattccggtgatatgttcaaaaatcttgacacgaaagagcaaatgctcgagaaaaacaacgaaaaacagatggaggaagtcgacgaggctccgacctccccgggtcgtcgccgttggatgttcctagtctacctcctcacgttcctgatccctgatttcgcgatccggttcattgggcgaatgaagcgcaaagacgtgcgaattgcctggcgtgaaaaacttgctatcaacatgatcatttggttcgcctgtggtgtagcagttttcatgattgtcggtttccctggagtggtttgtccaactcagaatatttacaacacggcagagctcagcggtaagaatggcgcgggtacagctgactcttatattgccatccgaggcgtggttttcaaccttggaagtttcatgccatcccacttcccttcgatcgttccccagaagtcactcaagacctacgcaggcaccgacgctaccaatcttttccccgttcaagtctcggctttgtgccagggtgttaatgggaaagtggatcccagcgtaccattggactatcgatcaaacttgaatgattccgcagccacgacatccagctccacctttgatatcaatgccaagtaccacgatttccgctactggactactgacccccgagctgattggttctacgagcaaatgcttatgatgcgctcgaattacaagaaaggctacgttggttatacggcaaaggcaatgaagaagctggccaccgacgattcgaagaatgtagtaagtatacacgggaaagtctatgacatgacatattacattgccgggccccgagtacctcgccggccagcggggaagaacgccactggcagtgttgataccgattacatgagccctctgcttgtcaatctcttccaggaaaagcccggagaagatgtaagcaagtattgggatgacttggatttcgacacggctctcaagtcgcggatgcaactttgccttgacaacctgtttttcattggcaaagtcgacactcgagactcagttcgttgtcagtttgcgcgatacttcattctcgcaatttcgatcatgcttgtcaccattattggcttcaagttcgtagctgcgttgcaattcacaaggaagaaccttccggagaatttggacaagtttatcatttgccaagtcccggtctacaccgaagacgaagattcattgcgtcgtgctatggactccatggctcgcatgcgctatgacgacaagcgcaagctactgctcgttatctgtgatggtatgattattggccaaggcaacgatcgtccgactccccgcatcgtcctggacattttgggtgtccccgaatccgtggatcctgaaccgctcagcttcgagagtctaggcgagggcatgaaacagcataacatggcaaagctctattctggcctgtacgaagtccagggtcacatcgttcctttcctggtcgttgtgaaggttggaaagccttctgaagtgtcccgtcctggtaaccgcggaaagcgtgattcccagatggttcttatgcgcttcctcaaccgtgttcactacaacctgcccatgagccccatggagcttgaaatgcaccatcacatccggaacattattggcgtcaacccgcaattttacgagtacattctacaggtcgatgctgataccatggtggcgcccgatgccgccacccggttcgtgtcggcattcctttccgatacgcgtctcatcggctgctgtggagagacgtctttgtctaacgccaagacctccatcgtgacgatgatccaagtttatgaatactacatctctcacaatctgacgaaggcattcgaaagtttgtttggatccgtcacttgcttgcccggttgtttcactatgtatcgtatccgcacagcggagaatggaacgcctctctttgttagtaaggctgtcgtcgaggcctactcggagattcgcgtcgataccctccacatgaagaatctgctgcaccttggtgaagatcgttacttgacgacactgcttatcaaatatcacccgaagttcaagacaaagtacatcttccgatgccatgcctggacagttgcaccggaaagctttactgtcttcctttcccagcgtcgccgatggatcaattctacggttcacaacttgatggagttgattccgctgtcacagctgtgtggtttctgctgtttcagtatgcgattcattgtgctcatcgatctgctcatgaccgtcatccagccagtcacagtcgcctatattgcttacctgatctattggtgtgtgagtgagcctagtgtgctgcccatcacatcattcattctcctcggtgttatctacggtctccaggccttgatcttcctcgttcgacggaagtgggaaatgattggctggatgttgatctacctcatggccattcccattttctcctttgctctgccactgtactcattctggcacatggacgatttctcctggggtaatacgcgtgttatcaccggagagaaaggtcgcaaagttgtcatttccgacgaaggcaaattcgaccccgactccattcctaagaaaatctgggaagactaccaggctgagctgtgggaatcccagacgtcgcgcgacgatcggtctgaattctctgcacactcctacggcacccgactgcctcccttcccgcagtcagagtatgggtaccatactggctcgcgcccggtctcgcagctcgacttgccccttggagggggtggtactcgttactctgctgccccatctgaaatgatgagcagctatggcatggaagacctcagccatctacctcccgatgatgagattctcgaagagatccgcaagatcttggcgactgcagacttgatgaaggtctcgaagaagaccgtcaagcaggaacttgaaaggcggttcgatgtcaacttggatgccaagcggccgtacatcaattctggtaagtcatcattcaatcaatatcgtaatggacacagctaacagatatatagccaccgaagccgttctatcaggggttctttgaacgatctatctatttacaatattccttttttttttcgtcttttcaaggtgtggacatagttcttgtgacaaacatgtgttattaattatttctggctgtgtcttgatttttttctttttacaagcgaacttatgcatggatgagagctttgcgcagcgggtttcttgaccttgattctttttttgaaaatgtcgccattcgcctcataaactatttatctgtatccttgaaatcgataattcccagagcttacccctggtgtttggttttggtccatgtgaattcgtacatcgtaggttttatattaatatatactaacacacttttggtctcatgagaccacagatccgttgtactagagaagttgcggggtgatattattcggctgattagagtcatggtatggaggagactgcaaaacagcaagtgaagagacacttgagtgggcatatatgcagagctatgtctggactcccaaaccttcctaaaacctatgcggtggtgacacaaagggtaattgagaataggtgatgaagcagtaatgagcgatatgaaagaaatgtcatcagaaattattgtataactgcatccttttcgcttgcactgcactaatgtgcggctcaaacaaagtctgtgctaggtcaagtcgggaagtagcggccccactttgaccgataaccttggaaggtacatatcaagacgacaaaatggcgacctaggccgttcacagtacgaccaaaaaacgttgtcatcgcggtatacacctgtgtacatgaattcttataaagccccccatctctcacattctacttcttccctctttctctcttctctttcacacccttcgtaagttcaactaacaacaccccctctacctgcattggacaactactgacatttctttacatcaaacaggcccggtgtaatctacaggaaactgtgaattactgcgaggactacagcccggccgcttgttgggactttctatctaatcgaggcttggagcaatccaaccctcgattatgatcatccgattgcaacctttcccaaaacaatgcttcggcaatattgggtgcgggccaaaacatgtgggcctatacgttcttttggggttccatgatagcggcttggtgagtattgtagggctcgtgggcgtgggattacacatcactagaacccaacttgggagccagtatgtgtaaatggcctgtttgtacacgcttcagactcaatatctgtcgactttacgttatagcagagccgaagatcaattgcctagctaggtaagttctgtttctgcttgatggaggtggtttcaatattccttcggtcagtcatgttactggaatacatttctcaacattaatataatagatatattttagacttctgttctcagccaagcgtggccaccctttatctagatttgaatgaagacattatccctccactggctcaaccgtctttgccatcccaatcaacacttccagccattcagtctcctgtgttgtaaaggcctttgccgcagaatttgacaagcaacatagattgctctcctctagttgccacgccgcaggatctagattttcgctcggctcctccataaacatgtcaaatcttccaacccgtttactacccgcatatttattctcatacagccaaccattgaaccacacagggcgctgctcgcggtccaaatgaagaagctggggggcgcagatagtttggtctgactcgtggccaggcgccattttgcgtacttttttcactggaacaccctcaggccgttcattagtggcgttgacactgtcggggacttggactacgcccatgactccagatccgcccgggtggaaggcataggaagtatcaccagcgagctcccatccaatccaaaaagtttccttatcacctgtgcagctctaaggattagcaaataaaaaagggatttgagaaggtatgtagtgaggcgcaacgaaccgaagaccatatcataagtccctttaatgtccccgccattgccatccctatctggcccattcatcctgcatacaagcaacaatgcgacaaagtgcatccacttatccacaacaacgactcccgactcttgcatatgcccgctttcaccggtccacattctgctctgctgcacggattccgaaatcggcggcggcaagatcttctgcagccattccctcttgctctctggcatgatcttcctatctctgaagaaaagggcgcccgtgcgcaagtactccgggtcatcaaatagtaactcggggttaatgaagaatagcgagtcggcgtcaatgaacatgacttcgcggaaagacgagagaagcatagaaaagggcttcccggcccatccgttgagctgccaaccttcgtcattaaccattacagagaggtcacgcgttgtgacgcctgacagagcttcaagcttcgtgcggaaatcttcattcaaatccctgtcaccgaggtacattatctcgatggggagatcgcagcccaggaggcgaaaggaagggatggcagccagtaggtaaggcgcatggctattgcccgctgttgttacgattccgcggcctccatggcgcgacgagacgtgcaagctcatgtggtctgcaaagtacgggctcgtccacggaaacaacagtgtagcgaatttggtgacaaagtggcggtaagtttcgtatttttgcagcgcctcggggaatgttgactcgctgaacgtgtcgcgcatgtggatgataatatcgtcccgcacgtaagtgtgatctctgttgttgacgaggtggacatcctcccaagcctcgaagaactttttatatgcgcgtgtgcgcaggccaagctcgtgcagcctcttctcccctgtgctggttactggctgtaggagctctcgggtgtctgactcgctgggaatggttgacagaaggtagtcaagagcagcgctagagatgtcaagccctagattctctggatccgtctttttgtcggtgtgttcaacattatttgataatgattgcgttgagtcttggtctttccctgttgcggagtttacgttttcctgcgactctaatggaatttgtacagttgatttttcatccaacatgtcttgcgacgtcgaatcatgtacaggtgattccgcagtcctgataccagtaggccatagttgccaaagtctgcccgtgaccaagctagaagtcgatttcagactcttggggcttgaatctggctccctgaggagcagagatgatattatgaaccagccagcccctaccgcaaagatgaagcgaatgatccgaaaaagcatgcgttttggtcgtgtttttgctttgaacctcggatgtgacggaggaaagcggccttctttgggtggaattgcgtgctgtgggagcatgatgtggacaacagtggaagatgaggtatctattttcgctgattttacaaaaatatgaaaaggaaagacagaaataggtccgtggacaactctgaaacagaaaggacagcgcgttgcgttctatacccctttctagttagtgttgcccttacctccattactttgtaccaactttataaattctcgcccttctttgcatatgaataaatgcgaggctcttcactgggaattgtaagtacatatgtagtaacccctatcaaaaatggtttccctttgttgctgatgttcaaaggttgaatggtgtctcagtggacccttcgggtacaaaggaacctagaatgtgagacagtctcagcattcatagctaggtagtagctatagaggccatatgtcgcctcctgtaagtagtttattaactaactactaactaattactaactactatgtagttccggtatgtagtcctggtatgtagttctggtatgtagttatgtagggagcaatgtagggataatctccgtagtgtagttccgtcgaggtccttgattggtccgagacagatttccagtttgcaagccggcttcagttttgatctctcgttaggatattaggtggtggtgatattcggttatgctattcctcgctcttcgtataactaagtagaatcacgtgtggagccagttgtaacgagtccaacactttattctgaaacgcggacgaataaaggctcggaagtcattgactttcctgctaaatactacatctacctctagccctgcaggaggaagagcgatatctcgttcgctgctacttcgcttagattagcaatccgaagcggacctatacagaatttccgctcacctacgtggtattatagcacaccaaagacttgaaaaatctctttgagtgactcggctccagcgatacagttttgtccctaactctttatcaagtctactcctgttcaaactacaaaggatgataaaagaggcaaagaaaacgtgaagtctttatgactcgcattgtttcctctctgtcaatcttctttaaatttcactaatctggtttctatcgacggaaattgcataaatagactcgatcgcaccctcttctcgtcaagttcattcaaagcatcatcaaccgactaaccacagaatacagtcccctacctaggtttgtagacctattcagaatcatgccaatcttcacatggaacgccgagcatcagtttctgcacgtccgcgacctatttatagctaaagtacagctcgagattgatgccattatgacccgcaatgagacttcgcccttccgcttagccctagcctatgacaacctcaccgaccttatttacgaggtacgtgttgttgaaaatgctagcgtcactatgtatagggagatgccacaatgccgtaccgtgcgcgatggacatggctattacgggtacaattccgagttcctgtggaagatccgccagcttcagggccatttagttgtacttaagaatagcctccacaatatatttgacgactggcattgtatttcgcgccaggtcggggctgtgggacagtgcttagacctttaggtatatgccaatttatttcatcgcaggagttttactcaaatgcgctagcgcttttcgtagtattgtagtcaatagtaactcgctcgtagactaagaagttgtttctggtgctcacagatatctcgagtcttcaagttctgctaaattcctaagctaaagactagtcatttattgctaaagctggttgccaatattctccacttagtcaaggggtgtgaataccaaaaataataatgctgtgttgaagccaacaatctgcactgcgctcttgacttcggtttgataacgactacccctagtatggaggagacccaaagtatttacagggtattgttttgagatacagtaacatatctattacgctaggctatttcaggttgtagttgcaatatcaaaagtctcttaaattcaaaactggacactaattaaacaatcactgattgtttttgattacgttgaatgtttccaagtacatcaatgaccaagagcatatcaggcaaatcgtccattggacgattcagcccactccgatcagagaggtaatggaagtttgttctatggctcttctgggtatatcgatttgaaagtatcttcttcaaaccctgtacccatgcaacataccaatagccctcttttccttgattaaatcaaaatcccactgcccacagcaaggagcccgaaggccaaacaaggatatcgcaaagcttgaagctccaacttgtttcttcgcttcttcgaaaaaaagcggggttgcatggccagttgcaagcggtatcacacagtttcctgcgtaatcccaaaaactccgctgaatgcactagacagaaataaccccaagttagtagcgaaaacaaacagactgaataaggggactcacctggagtttagccgacccgccagaactgggattgtgcactcccgtctgacttcaggtcttcccctaaaggttctgatgaaagaagagcgcaggtaagagatgatgacaaccacagactcgtaagactggtaagacttaccttggacttgtgtcccagatgccccgcaagacgaaatggcagcatgtatcactacgtgcataccgacttcgcctcaggcttccaaacccgtagggattgatggtactggcgaattatcccatctgcctccccaaggttcacagcacggatcctccaaaagagggtgccgacttggtccgggcgtttttgacaattattctaatggaaggagactgtggttagaaatggtaaaaggccactggctggagaactcacccgcacatcaccaaggctgacagaacaatcaatgagagtccaagctcaatgcaggtactttgctgccataacgaaggttctaagaaataacaagtcagtgaaacgaaaacgattgtcagtagtggaggaattcaccccacatcaccaaggctgacaggacaagagtccacgcttagtacaggtacattccgtcatccaacgaaggttctgagagataacaagtcagtgatggggaaaaaattgtcaccagcagagtagagggactcaccccacatcaccaaggctgataggacaagagtccacgcttagtacaggtacattccgtcatccaacgaaggttctaagaggtgataagtcagtgatggggaaaatattgtcacgggtggagaacatacaaccgctaccgaggcttggggccctggcttaggttttccgacgaaggcactaagaggcgcgagtcagttataaaaaaaagtatgtccaatctgcaagtgggacaacataccatgccggttcgatatttacaggagaccctgcagtgtcccccgtaaatctctaaaggctgttgaatgttagcagctcatcttgaccgaggaggaggtatgaggctcacctgtaccactcccatgaaagctgtgccagattgggtccgggaagcttgcaagggaggaggttgaaaggaggaagtttgaaagaccctggggggactttatatagcagacctgacctgtgcaacttgctctggcctacttaggaagtgatagccccactttttatgttcgcgaacaaagaacaaaggaaataagaaagtactactaagcctaattggggtgggaggtcgctaggtggctgggagtatgtaaaaaaaacatttaccaccttccatactatagcttgaactacagagtacaaaaaaaacatttcaatcaactaggactctaggggtcctagcagcttaccagaatgtaggtggatatcgtagggactgaaataatagctgttcgatcattaatgagacatgtctccttcaactctatgcaccactccttatgctgaccggtgaaaataacccaggctagtagagttactacgcctgtttatttctccatggtattcataatgtaatgccccaatacacgactctatcaatgtgaaaaatatccaaggtcgggacccgtcttcaccgcgtctctctgagcaggtccatagtgacgtacgatattttgcacttataatctggagcttcctcgccgtctggaccaagctgtcttttttcttacgaatacgatagttccttgagtgaacatgatccagaacggacaatatatatttgactgatgaaacctcaaatagggataaatattccacgaacaagtcagatatatgccctcttcacatgttaagtataactaagtgactggaacttgcggtctttacaaagcgagagcgatcgcgatcagataccctgatcggcacatctccatcattatccagggcggggggaacggatgccagagatgacatgtgccaagtggggctgtcaatcttttgtctactccgtacagatgtcttatatcagtaaccgtacgtccaaacccccagcgaaagctacatagagatccgagcgagttatctgggatcatctctccaaagattataatctacaaatccatcagcaaactccaaaccaaataaacagccaaccatggataaccccaccccgcaaccgaacccaaacccaaatccaaccgcagacccagaaaacccaacagccgaccaacaacaaaaagaagctctggcagcctttaccgcaacactccactcagtcggaacaaacctcgaagcgccactccgcgaccgcgcagcaaatatccaatcgaacgcggtggttctggaaagacaagaagccgagctagcagagaatacgcagcgactagcgcggcagaatcagcagtggattggattcgcggatgagacgcgcgacgggttaaaggagatcggggatgtgcagaactgggcagagatgattgagcgtgatttgctagccttggaggatatgatggatgttgttgagagcggccatggggaacatgggagtgaggatggcgatgaccggggggatagtgatacggaactggatgacaacgcaagtgaacagaatgggaatgttgatattgatgctaatgggaagaacgtggatcgacgaccgaaaggatggttgcgatggtggtgatggttgtctttgttcatttgatttgttgttcttatttcacatatatatcacgcgcagggtatcattatggattattctccgtcttcttcttcatcctcttcggcttctccttccaagtattgtttccaggggtctagtccttcggtatcctggtattcattccattcatcccactggcccagactcatcaagtgtcgcatagtcggtcggccatgcgggcagttccatggtttatcaatagtacccatgttccgaacgactcgttccatctgccggctagtcaaagtctttccgatcatgatacttgagcgacaagcgcgcatagcaaacattttgcgcactttgcttggccgtggtactgacgatccatttggcgttgaaattgactctgacagcaacacgatcagttcctccagatcccgtacaccgaaaaccacttccttgcttagcggtaacgagaccagctggcatcgacgaccgataggctcatcgccgctttcgtcgacagtcacgaggaacccgtttttctcaagggcggcgcgattctcaaggacaacctcttcttcaacggcagtgagatcgaggcgttggggacggacgagtcgctggttttgcaccacggtttcagcttgcaggcgctcgaagttaattttctcatcagaggcatgctgatcgatgatgaagagctcatcttggtcttctcctggacggactgcgatgataaagcccaagttgaactggccgattatgcgcatttgagcgaaatcgttcttgcttacaatcaacgaaagtttgtcctcggctgttttttcgccaagatcagtgacttcctctctcggtttcttggtaccgtctcgcatggtcttttgcaatgtgataagttgggattggagacgtgcaatagagccatctaccgtaccgataagctgtatagtcgcgtcgcgatgcgcagcgcccttgctcattttctttgcacggttcgcgctgttttcttcgggaagtacagcagtctcttcggcttcatgaatcagccgttgaactgtagcctcttcctgcgccttcttttgagcttcaccgatattatcatctacggcagtttccttgtcttttgcctcggtgttttcgggttctgattgagctgcactttggttgggaatgtaatcagcattctcgggcggaggagagccctcctcttcagactcttcttcagcgccttgtgtgtcctcaatttcacttgaagggttacttccatcttcctcaatctgatcatcttcactagcagatgcctcttcatcttcttcgtcaaccggctgcgacccaggtgcagcaaaagatttcatatgatcactgaagatattaggacgtgatggtgtgtgtatcagtctcttccgccggggctgcgctctgattaggggtggatcttctgcaactcgttttcgtggaagaccactaccgaccatggacgttacggttcggttgccaatagtgatggtagcaagttcggcaggttctcgtcgtgggcgcattcgatcgaaggcattctggacaatgctgggaatttcttctgggtctccacgagcacgagatggagtctcgtcgggagctgatggctgggatgatggttcatcggagataagggctggctcgggctcttcctgggcggcttctgggacgaaaagttcatcgtcggagatcgccgcggcaggcgtttctagctcacttggggctggcgtcgacatcgaagagcgatcagttgcagcacggggtgttctcattgatcgagccggagatggtgtgacttgcgtccttcccgtgcccgcctctgagctcgagaaacgctgaatcgcactctgttgactcgcccccgaagtctccactgagctttctttcgtccgatctcggcttggacttctaattccaccgttttcactcagctcccgagcagtgacgaaccctggaagtgatgctagtggttgctgttttgacaaaggcttagatttaaccgatgactgcggcacagtttgttccgcatcaccaaagagttgagtaagagaaactttgagcgattcaatcatagcccctgcatcatgaagcaaaatttggcgcttatcaggcgaaacgttgacatcgtaagcgtttgtatccatctgaaagtctgcgaagataaacgctgactgtgagacattgaacgacttgtaaacctcgttgaacgccttctgaatctgtggcaggccacatggccgcgagttgacaaagaacatctgacgatccggagtttgacggccctcgccgaatacaggacgtgagatatgccctcgcacctgaattttactcagttggtcatcgcctatccgtttcgtagccgtagaaggctcaaactccagctctagatcgagggatatcagggcagataaggtcttcgcgccatacacattggcaatattttccttggtagtcttatttccatttgtcgaaaagaccaccacgttccgtgtcttaccaacagtgttcctgacactgaatcggactccagtgctgatgcatgcataggcatgtaagagattcagaaccttcccatattcccgcttgatgttcttctccaattcccgccgacgcactggaagccgcttgaagatgccttcgaccgacgcagtcgttcctttctgtccagccacgatctgtgtctttcggagtttcccagattgttcaaagtcgagtctattcgcgcgaggaacttgcttttcttgtgccgtgacgatgtgaaattcagccaatgcgcagagtgaggatatcgcctcgccccggaaaccgaaggtgtgcaggctcgagaggtcgtcgtacgacgataatttggaggtatagtgtttcaatgctaagagaagagtacaagtcagcttgactgcaatgcaccctgagagaaatgataactcacccacgttctcatagttctccggcgagatcccgctgccgttatcttggacctcaattaggtccagtccattattcttgaatcggacctctaaaacccccaaatcatcagaaatatgtcacaaacaatatgccgagctgtttactcaccgattgtcgttgcgcccgcatccagactattttcaacaagctctttggcgacggagcacaagtcaacgatgacttgacccgattggatttggtgtacctaattaatgcgctggtcagattgggacgtcgggaaagacatcagattgcatacagagcgggcctcaatggcttggattgttgccatgttcatcccatgatgtctacagaggagaagttggcacgcgtctcacttaacgcgtgggtttgccaagaccgcggtgagccagttgattatgacaagctcgatccatccatggattcgatgacgcccctgatgttttatttacgttgcaaggacataattgaatttgttcatttgcgaattggatagaaccgcaactatggatataaatcaaaatggtcaattaggagcaacaatatcgctcttaacgcgcacaatcaatatgaaaaaactaataaacaccgaagcgatctggcagcataacaggcgcaaccagagtccaaagatagatagcatagcagacccaggcgctgacgatcttcacccagctggcccagtatgtgcggcccaccggtgcgaaatctgtcgtggtctccagtgtcagtccctggactaacaaagtggctacccacgttgtggcgaggaagaagatgatgtggaagagcgagtagttgtattgtgttgaactacgctcgtcgtccttcgtggtttcatagtcatcttcgtcgtcactttcatccagggcactagcaggaagactgccgctctcaacagcagcccggagaacttcagcgcgcatctctcgacgggcatttggttgttgagtcaccaagccgtgctcgttgtcatccgtgcccagctggatgtagctgtggccgcccttcgatcccaaggcaattccttgggtagcagcgcgtgtggtggtgtatgcgatagtcagcatagtgacaatcgcaccgaggacgatagtggcagtcctagttccgcgggaccggatgagggggttgcagttcttgtcatccggttccattgaaacggcagacatggtcaggtaggtgcagtagacagtgaccattgcagcctgggccagtcctgcgcgagagttcgattcttgcactgctggttggacagaaacgaaagagatgatcaaaaacacaaccaggttaacctgtgacgagtcagttaggcgctaagattggtggtgtgggatacatacggtgatagcagcctggttcatagagcaaccgctcttcgcgaagaagatatacatcaggatggtcatgaccaaagacgccaagtacatgccgagggtcgaaccaataagcagaccgcgccacacgcgagagtcgctatcttcgatcttctgcaggcatagctccgcccacgagtgcgcaaggtccaccagaaggatcaaacccaaaagcaggaagagcatggcgcagaagaaggcgatgtagttgccatagacgaagaagaagggttcggggataaagaaagacatgacgataaaggccagccagaggatgaccttcggaccccaaaatccattttggagagcggcgcgagtatctttcgagcttttgacgccaagaagcaaaagggcgaggagtaaatggaagagaccgagggcaaagttaatacgatggaccgcgacccagccgtgacattccttcccgtcgcatcgaatctccatataatccagtgtcagatgttgcaatttcttcagggcccatggcgtgagcataatccaggagagtatagagttgatcaaaaggatgaaggcataagcgattctcgtcgccatactgtctttgttagtccgagatcctccgcactaggcagttgagatggtacctgttttgaaactttccgcaggcgctacagactgcagagcatgtcgctgctccacagcatgatgccgtgactgtcaggatctgttgaggaagagaatcaagttagcaactgtaacatggtgaactggagattgggcgacaacatacagaaccaacgctcggcacggccaacagcgggatggaaaggagggcacccatattgggagtgcgtgtataatatagcccactgtcttagttcgaatgtaaaaccttggaactgaaagtagatccagaatcgacaagagtgtggagagaggcaggtgattgaagatcgtatgaagccgccttcgtcatgaatgttacgtaatatatccaaatcgaaatacatcacgtgccaagtctcttttggcctgctattttaggattagcgccccgctatctagcatgaccctcggcatcatcatcaacattgcactagagggatccaaaaagtatgacattcgagctagttttcaattggtggaatgatgacctggaataaaagaaagggattccattcgttgagaacattgattatttcaaacaaaccttggaagctcggtaactacagagtactccgtatagatgagatagtatatcatgaaatgtatatatcgaggacatcccttattgttgtaaatacaatggacctatttagacaaagaaacaacagatcaataaatcaaccgctctctctctgctcggacttgattggacttgactacatgtatattcctggtgatataaaaccgttggaaatcaggcaacataaggctgtaaggcatccaatacaaatccttatcgcgcgtggagaaacgcacttggccgtgcactcgaactatgacgagtcccgattcgcgcaatttcggggaatctgacggattgctgtgttatcaacgcgggatgcaacgtagaacttagatgacatagtacatctcttactacatctctatttctctttttacccctcctcagattccttatagaaatcagtttattctcctatttgtgcatctgacgtggagcaaccttttcttggcacttgcttgacggctgttccgaccacgcggcctccgggatcatctccaagtccttacctaagtgtaagctcctgaaaactcccaagtggccttattccttcaattcctcctatataactccattcgctcttttcacccttcttgtccttcattccggggatgtttctcccagtgtgggcctcacatctgtttacctagggcctagagcgcttgtatcgcacaagatatcaaccaaaacgaaccgtagaggaacgacatcatgtccggctctctacaccgaactgcccggattatttctgtcattgcggggacgctggtcgccctctcatgcggaaccaatgtgcgtgatatctccggtctcatccccattcaggaccattaaggttaacccatcttagtatgcatactccgcgtgggcgccgcaattcgcgcagcggatgaagctctcatccaccgagagcaactttattgtgagtaatgccatgtccggtgccgggaaacgggttttaacagtgtctagggtgtcgcgggaaacctggggatgtatgctatgggaattccaatgggattattgacagatgcccgcggtccccgacttgtcgccctgatcggctctgttggcctaggcctgggttacttcccaatttatatgggtatgtgttgaggttaccttgtcggaattgagcagctctaatgtctgtagcatatgataatggccaaggatcgatgccggttgtgttcctatgccttttcgctttccttactggcatgggcggttgctctgcctttggcggtgccatcaaaacaggtatgttacactaagtaatttgcttaatagagttaacctaatgattccagcggcatcgaacttccccgaccaccgcggcacggcaaccgctttcccgatggccgccttcggactaagcgcgctattctggtccaacctgtcgactctcattttcaaggacgataccggccgcttccttctgcttctagccctcggaacctcgattctgtctattgcctcaatcccattccttcgaatcctccccagcgagccgtactcatccatcccacatggcggacacgagtctagcgaccttgataccgtgctagaggactccgatctacatggctctaccgcttttgatcacgaacaataccccgtgcatgcgcggtcgcactctgttgcatcgaactcccaaggcagggcattcagccatgccgatgagactgccaacttggtatccaagcacgaccgcccgcgtccctctttcgatacacttgacgatgacttcttggatgaagtggccattgaggcgcaccaaactgatatccgaggtctcgccatgctccgcaaagtcgagttctggcagctcttcttgaccatggcactcttgtccggtatcggcttgatgaccatcaacaacatcggcaatagcgtgaaggccctgtggctgtactacgacgacagcgcaacagacctgttcatccaacaccgccaggtcatgcacgtctcaattctctccttcggcaatttcctcggccgtctgtttagcggcatcggctctgacctactagtcaagaagctcggcatgtctcgcatctggtgtttattcttgtcagcggtagtctttaccctgacccagctcgccggcaccaccatttccaacccgaacagcctcgtcgttgtctccgccttcactggaatcgcttacgggttcttgtttggcgtcttcccttccctaaccgcacacactttcggcattggtggcctgtcccagaattggggcgtcatgacactagccccagtgttcagtggtaatgtcttcaatttgttgtacggtaatatctacgacgcgcactctgttgtcggccacgatggcgaccgcgagtgtcccgatggattgggctgctaccgctcagcctatttcatgactttcgtttccggcttatttggtatcgctgtttgtctgtggaccatcatccgggagaggaacattaataacatcatgaataagaagatggaccgactcgcctgagttggataatctaggcgcaatagtacctgcatggcaggcatgtgctcatgaattgctttcttgcttgcatatctatctcgatctgtttgcagtttgttatgacttctcacagagtacatttcatggatattatttgggtcctcatttctaccgtttctctataaacttgatactttctttgcctgtctttatttgagttaccctaccttatacgccagaacctggccaatttcattattgtacatttggagaatatgcgctgctgttcaaccccaagtagttactaggctcgtccatgttctactcaacccagctcttagaaccactacgagcaaagattctgcatgacactttcattcccgtcctaacatacatatagaatatcgcagcgcagaaagcgagaatgttgcctcaaataaatcaaaaacagaaatcccggcgctcagacacaaaaagctgacctaacaatcaaaaactgttgcattgcattgctctattaaagcagcaaactaaaataatgatcattggaagcgccaactagcacatggagggaaacatcccgggcaaaacacccagacgacgagacatctcccagtttgatcaccgattcgatcttccagacgcttgagttccgcaagaagagaaggatagggaccaagtattgtattagaagcatagtggaagagttcgtacagcgcaccgcaaggaaagcaaattaacaagatgtttggagaaacatccagacataacaaaagtaagggaaaatcgagaccgttcaatagtagctttttttgggtaaagttccagccagtgatgacgaaggagccatgaagggtatcaagaatatcagaggttggatgagaccagcaaacgtaatgtagcttataagcttgtactacccgtggaccgatgatgaggagaataagcaggtggaaaagggctggaaatagcaagatgccgcaagatctaaacgctcttgggagacttgacaagtacatcctcgccagattccacaacatccgacaggcggatcttttttgcgagcggctcgccggactcggcgtcaccagcgccgctagaaccgagctggcgctcgagatcgctaatacgacgcttgagatcctcctcgcggcgctgagcatcctccagagaccgtctcagacgaacctcggagtctcgtacaatcatctccgaccgacgcgcgctggcgtcactctgctcgagttccgtcacgcgaccgcggaagagctcattgacgaactcaagttcactgacgcgtgtcttcagggatgtgtttagagccagaagactttcataggtgtggggggaatcgagttggcggtcgactgccgagggagagggctggcgcatctggcgggaggggaggccgctggaggagttcatgctatcgcctagggtgacgctgtcgaacatgtgctgcggtgcgatattcgagttgtgcgcgtgcatcgagccaaagccaggtgtctcggtccgggaaacgggggagttggaacgatccgaatgacccgaggacatcttgcgcgacgcgcgacggtatccatgcgagccgaggggaggaggagttcccgcctcagatcgcggcggaatgccattggtatcgacagggccgcctgactatagaatcacagtcctgattagcgcatgttcttatctaagataggtgggattggattgggcgtaggggacggggagaaaatttttttgatcgcgaactcaccttgcgcttagggccctgaccagtcttcacgcgattgcgacttttaatcacatccgttttcaagcttatcggacgaggtcgaccatgcagtttcaggaacagtccacatgcgttgcagaggactgaaccgagttcgtccctacgccacaggggcgtggtagaggtgccgcaattttggcaaacaggctgtaattgaggtcgcttgtcgtcagtcaatgtggtcgccattatgagggtatagaagtgaggaagaggaagaggatgataagattgtagagatttgagtcgataaggaaagggaaaaagcgggtgcacggatcgagtggcgccaagactttcgataactcctcagagataagacccagcgcgccgataacacatatttcacacttacaggtccactcccttgtcctcctgtcgtagccgctggtgacgacgtagcgtaggtcatatttgccatacccatactcgtatcactggatgagctaaaaatgggaggggaaatatatggattagccaattgattcgaattcttatgaggggccagattactgctctccaggtgcccgagtgaagattacgcaataagataggtcgcccaaaggtccacgggtggcttccattgaggactggtatggggtatcaacgcaccgaagattagaggttggtgccgaagcgaccgaagccagtgctgcaagtccaggaagcgaggtgctaacagaagagcctgggtatccgtcgctctcgcctgagccgaatttggtcacgctcttgatatccggcagtgtcgtggaaaactgtgtcgatccgttggacgcgtgacgggtcgaagaattgtcggcggacaagtcgtaagggaactcacgctcctgcgaagaacgggatttgatagccgggtcgatgggcgacgcccgatagagggtggaagccaccgtggagggggaaagtgggtgttgattgaaatccggcctcaaaccgaattgaaagagaaagggtaggtgtcgaacgaatcgcgcgacgggatgcgaatgcgattgggaacaacggactcggaacaggactctaggtcaatgggtctatatcaagacaattccttcagtgatcaattcgatatgaagttccgagcagtaatgatcgataccggaaaggagcgagaggcttaggcccgacaattcttgtgcctgaagaagtaaataagaccaaagaacagaacgaagacttaaattaacgacatgatggccgaggattgggggtaggggttgggaagaagatgcagaattgagatggacgataagacgcgataataacaatcgggataacgattgccccagtatcgactattatttgatacggcatgtcaggggcgtcacgtttgatgttttgtctcacaaagaatgtatacaattcaattaatcagctcttcattctacgccacccagcctcttgatatctggaagcgcaaaaaatgaatccattccgcattatctggttcgcctacaggtgatcaacgggttttatgcgtataatttcctgcacgagcggatattgccagcgtggcggatttagatttaccaacattgatcgtatgtattgaattgacgtcccctgaatatcccaattcgtcatagaggggtcccatatggagatcacggtgctagccaagcttcaagggctttagagcacagaataagtcgatgcatccatccatctaagaccccttgcgattagggggtggagaccgagtgtggcggtgcgtaatggtataacggttattaactaggtggacctgcccatcccacgtaatttaccgcgttctgccgttaattacgacaccgcctgcgtaaattaactgtaacaatgttttcgggacgcccccttgggcgtccggacataggtgaccacttatttcaaccgccttgactctatcaactctttattctatccaccagcggtcttttccttcttctgttctctgtgatggattaaaaattgtttggtgtgctttcgttcttttgccggccttcctctctttttcatacgggttattttccccgttttcatcttccatagatccaaccaccctcaataacaatgccgaagactcgtcctgccacttcgggatacgcccggctcgcccaggccgaagaggaaagaggctacctccacgatgagtccgaagacgaggatgtcggtgctttctcaacagcgtccacctccgctccccgatacgcccccgtctcctctagagcccagatgcaggcgtccggtctccacacccccccagcccatcgacgcagacacagtggttatactcaaggccgtcggaactccggagtggatatcaaggccatcaatgcgcggctcgaaaaatgggcggacgagattgcctccaaattcaagatcaaccgtgtcaaagggaagagctatgaggaagagaaactggagatttaccattcagtattccaggcacctcccggagttatccccgtgaccgccgaagctctcgaatcggatgagtttgagggtcagcaacggcgagcccgcgccgagtacgaggagataattgaaagtgtgcgtcttgcaattgaaatggacatacatcctcggatgatctcgcaaggaagctcgggcagctactttgctcgaaaccctgaaggtaaggtagtgggtgtgttcaagccaaaggacgaagagccgtacgcctcgcgaaaccctaaatggacaaaatggctccaccgtaacttgttcccctgctttttcggtcgcgcgtgtcttattcccaatctctcctacgtctccgaagctgccgcatacgttctcgatgcccgcctgcgcacgaacctcgtcccttacaccggtattgtacgactgtcctcgagatcgttcttctacgatttctgggatcggagaaaggcatggaaaggcaagaaagttctgcctcccaaggctggcagtttccaagtcttccttaagggattcaaggacgccaacatttttctccgagaacatccctggcctgaccaggtgaatactggattccgcacctcggatgctccgaagcgcaagaagcggccgtggaacgaggcctgtcgtccatcgggggcacagtccgacgatgaggatgacgatccgggctatgtgccctcgcccgacggttcgcgtgatgaaagtgctgagcgccggttctactggaccgagaatctcaagcaatccttccgcgaagagttggagaagcttgtgattctggattatatcatgcgaaataccgatcgaggtctggacaactggatggtcaaaattgactgggggacagagcaggtttctatcgtggcagagcccccaaaacagactagcccacagcctaagcacgatgaagacgagcttatgcccccagctcgtcctgtttccgtgaattcaaatggcacttccaatccctccttccacccttacaggcgacatgaaacaatgatggctatcagtcgcacgggaactccattagcctcatcggaacagtcagcttctgtccagcttggtgccatcgacaacagtctttcctggccatggaaacatccagatgccgtaagttttcgaatacgcgggtagttacttccaacactaacaacttgtagtggcgcagtttccccttcggttggcttttcctaccagtttccttgattggacagcccttctcgcagagaacccgcgaccatttccttccattgttgacatccacggcctggtggagcggtacccagatggctttgcgtggtgtcttttcgcaagatgatgatttcaaagagagcatgttcgctcggcaaattgctgtcatgaaaggccaagcctggaatgtggtagaaacactgaagcaaccggatcatggcccgcttgagctgactcgacgaacccgcgtctgtgtatgggatgacttagttgacgtccccgttgctatcccgatgcgcgcgccttccacggacaagcaaaggaaccaacatataaggaaccaacatatgaattacgaccctgatgaagaagagatggatattggtgcatccgcatcttcccaaccaatccccgaacacgatttattagggttgaattcgtcgctaagcgacctccccaacccaaaccggttcgaacttacccgtggtcgaactgacgctgacagcgaacgtgctgatggttctatcggtagccctgcaactataaatgacttcggcggccgaaacactagaggttctctagacggatggccttcacactcccgccagcacaagaatcgcaaaaacggcggtgccgtacctttccgtgttcctcatgtcaacacatttggcagcgatgatctcgagggtgaccttggctatgcagttgcagagggtatggaaggcaaccagcgcaaggtgattgtcgagcgcctggaagccgtcaagagcaaaaatcctgttttcacctggtgctaaggttagattatgtcgtactacccttttcgctcttcgctcttcacttttcacttctccacattcctacattacttctctttttcatttaatgtgcagctattttctgcgacgttgtcttctcggggtatttgtcgggtccccgtccttcgggaaatggttcccacttcctcttcatgattcgaccgtgccttttttttcctgcgacatttcacacgagtcctttgctggacatgctcatgatttgggagatttccttgttgtatatagacattctttggctgttggggttaccttaggctatggcgcattgattgggcgatctgcctcatgtagcatattgatgagacctaattacatgatacctttatcgtctattctttgagtcaactataataaccggttagctagtactagcatgtgactgcagcatgtagctaggctggggtagacgacgatgttagtcactacaccatattggatattagatgaaggaattcacccaaatgcctacataaaccaaagtaacagtaagtggtttgtggacttactccaacacatatcttacaagattgatacttcgttctgttatatattgtgctgtgacacagagacgttggtttacacgtttgaaaggtatcatgtcgtgttgggaccatctgcgaggacctcttgaaactgctatattggattcagaagaatctatcgccttaaggtgagatctctgaatggatgcattaatatctccctagagatgtctactttatatccaggcacacacagcttattactctagcctaggtaaacaactcaaagccacgcgtcttcggctacggagatttacacccctcatgtattccgtgggacttgtcaagtggcaatgagagccacgacttcaggaacgtccacgagaaagcccagtttgttgtttgatgcagacctacatggacctcatacatatggtaatgttatggtccctgtggtaggtgaagccgcatgtgctacggcaccctctgcctacactgtctcgtgggggctacggcgagatggtggtcagagggatgggcagaggagaagaaaaagagaagagaatttgggggggaagggacccttttatacccccaacccacgtgccttcccaaagtgcgataccctccatcgcaccttcctggaatcacaaatgtcacatcggccatgatcatctttcttttccatatgacctactcatcggacctggtccagctcactgttctatttagggtcaaaccgacctgccctccttcgcatggccggcttagagctgagagtcaacctctgcgtaaatgggcgcagtggttctatgacctgaatctggctactcagtctgcctagtgtgtaaagggtttaagaattcgttcattcgatatcgacccataagagctaatattccacgacctaagcaaatactatctatgcaacaacattcgaaaatattgacatcttcaaacaactcccacgtgtgtatgtagcatgaagtaccttataactatgcttgcaatacattaggctagaaatcgacacacctcttccaccacgagaccgagatcgaagttctgcgggtgcatgagctggttataggctaagatttcaaatagctaaacctctgggtcaacgaaatgaataggtatatcaccatctctcgagggctcgctcatgccgaagatcttatcctctaatttattccccacagacttccagtaatctccctgttgatcttgatcctttagggctttgtgggtcttttcgacatcaaacatgtccgtgatcagtccgtgttgggccagatgttcgatctaatgtctaatttgttgcatttgaccggtttgccacgcaaaatcgtggatatcactttgtctttgagatcgggaggcccacggccttcgagaaccaactggaaagcagttaccatggcattcttgccaatggctgccgaggtcctttagataatcggcaattacagtagctttcatgtcgccggtggcatcgacgtggaagctactatttcaacggtcaagagttgtgctcaaaaactgcatttggatgggcctaggctgcccaggtgcgctcaggcgcagtcatccagcttacatgatgaccaggtgatgattaactaactagttcagcaccacataaacatacagtagtagagcattaattcatttatggattaaaatatcatagtcaggcaagtcaaagcagttcatttaaatcagaagtatacaaattccaatcttggaagaaagggtggctgctcaattttactcagtggcagaaagcggcaagggctaagcactaaaacggaaaatgaacgccaagaagcacgcaggtaagcgcgcgaggactgataagatcttatcggcgggtttctccgaggcacagacttcagtggaagaaggacttcgtcatttcgagttcctaacaacgcgaccgagcttgcgactgacttgagcaaagaagttgcgcgaaccaaaagacctacagccagaacgactcgaggtccaagacacttccctcgaccggtacaagagccacccacgattccttcgacgaggcaaacgacaaggcgccgactcgatcgcgatcaggaaaacgacgtgatttcccctgggaaacatacgtcggtgactgaggcaacagcgcaactagtgttgcccgtgtttctcttccttatctctcactttcaatgacgccggagatttcgcgaccctcgcgtctggaagacgcacctttcgttggccacaccgtttgcttaatcactgcgctgcgacgttagtatttgacacatgatatcaaggctcaagggtcttgaacttgattgatatcccctcacaagcaaaccctatgacaggtcaggcaattaatcaatcccaaatcgcaaccgcctatctctcatcctaaatcactcgacaccgctgcgaatacttctcacatttgagcctggacgtaaagcttgccagtctggcagaacttggtcctatatttccaaccacggcaagtgaaacaaatacccagccttgttgcctctctcatcaactgactttcatcagttttctttcacagcatcgcccaaccctgaatccgaccaaagcctatcccgggtttttcgactaccattacaaacatcatcatggcatctcatgctgcgatgctcttgaatcccaagggcgctaaaagacaagctcaaagcaatggtaagcctccctttgcttcttccccagcgagtgatttgtctcccgtgggtgccgtcgctatgtcccgtgaatttacctcggacaacactaggcccgtgacttattcttctgcgctttcttctcctgctttccctgatgcttcttcccatgtttctacacctactcatgtgaacacaatggatacttcggccatgcctagagtccttcttgacatacctgaggcatctgtccatcttgacacccagatagacactcgacccacgtctgcggatatgatgcattcggctgaatttcgtctccctactgctcctcagatggatactccggttatgcatacaaagtctctttggccaaccgactctgtttccccttgcgctctcaattcgcttgatccaccttcaagtctttcttcccacaattcatcttctcttgtcacttcttctccgacagaccccatgcatctcgaccccacggattcccagggcttacttttggaatgtacaggaaaacaccacggaaatagttcatctcctggctctcccatggctaccgcgggcactgcagccgatacacgctttcaccaatccactagtcgcacatctccaagtgtgccatcgatctcgaccccggttgtgaagccagactccaatctgacagtgcagttcaccaccacccatgatgaggacatggaaagcgacacgaaaagaagtcaccgcgagatgagtgaggatgaagacatgacctatcgacccaatttgattgaaaatgtctatggagttgaaaaacggaagaaccaaccgacgaagaaggtcaaaaccgagcatgagaaaccgaatatggcgaacggaccggtctcaatctctggaaatagcgggcttgggaaatggatgaaagaggatgatgcgaaatcaacgccaattcccactacactcaacgtggtggatttgacagcgggtatgagctgctttatttctgcggattgtgttgaaccaatctaatgtttttctagaccttgcgaacacacctaaggaagatgacgaagtcctatgcactggttcaacagatctcagcgcccagcgtgtctgcttcggcaagattgaaaacgcaatgatcatggcccatacagtccctagacccggaccctctgtttttaccgactggtcgcacgcttggccgtctatcaaactagacctgcgacgccagcccgtgaaaggcaattttcagatcgacgtcgcggacccccacggcaaagttttcggtacaattgatcctaaaacggcacaaggactgtgtccgctcctggattccgaaacagattttatcgaggtgacagccttattggatatccgaagaacctcgccgaatgaagaaatttgggctcctacctccgggctgtggcgtgcaaccctcaatatctacggccaacgaaagcacgcagaggctgtcggcaattttctctctcaccgcaacatctggctgggtcctccgaattctgtggacaaaggaactactgtgttcaacccacatgcagagagccgacgccaacttgccgccgcaagcgctgccgccaacaactccgcgcggtcacgcccagggccagttgtccgatatgaagcgcgaactgctgaagaggctaatgatgcagtcatgaagatgttcgaccagcttgccaacgcgaacattccgacgatggagccgtctaatcacatcaccacaccgatgcttcatcatcaaaagcaagccctttggtttatgacagagaaagaaaagccgcgcaaatttggccgaaaagaagaagacaataattccttgtggcgaatggaacttgcgcccaacgggaggacccaataccgcgagatcattactggtatgatttcagggcaaaagcccgaggaggccctaggtgggttgttggctgatatgatgggcctgggtaagactctgagtattctttcgttgatcacctcatcgcttgggttagctcaagaatggaccgatatggctcctgatcccgttcttgttcgccgagctccgggaattcgcaacacacgaacaacactattagttgtcccgttgagtgcagtgagcaactgggttacacagatcaaagaccatctgaagccaaactccatcagctactatgtcttccacggcccatcgcgcatcactgatttcaaggcgctttccgaatttgatattattatcacgacatacagtaccattctcagcgagatctcggggcgtggtgccaaaagtggaaaacttagtcctttgacaaaaatgaacatgttccgaatcgttcttgacgaagctcatatcatcagagaacaaaatgcggcacagaccaaggcgatccttgggctccactctgagcgtcggtggtcggttaccggaaccccaatccaaaaccgcatggaagatctcctgtccgtgaccaagtttttacggattgctccttacgaccaacgaagccaattttcccaacatgtatccaacccggtcaaaaatggtgatcccaatgtacttgcgaggctgcgagttctggtagattcattcaccttgcgcagagtcaaggacaaaatcaatctaccacccagggaagacaatatcatcacactagatttcagtgagcaagaacagcaattgcatgagttcttccgcgcggaatcaaatgtgatgatgagtgtcattgctggtcaggacaaacgcaagataggtggccggatgtatcaccatgttttgaaggccatgatgattctccgccaagtcagtgcacacgggaaagagcttcttgacattacagaccgggagagagtcaagggattatctgttaacgatgcaattgacttggaggagaacaaaccggaggacaccccggcagccatagacaagaaagcatatgagatgttcgccctaatgcagcaagcttcggtcccccgatgtggcaattgtaatcgagaactcgatgaacctttgaatccaatgggagctgtcgaccgtgacgctccgatggctattgtcctaccatgtttcgatatcttctgccccggttgcttctctggctggaaacaaacttacgattcgcatcccgagactgagacgcgttgcccgaggtgcgaaggctggatcaacttgaaatactcgaccatcacgcctgctggctttgaagaatacgaggcccaaaaggaaagtgagcggcaaacccggaagctgggcaagaatttgggtgaatacgagggcccgcacaccaaaaccactgcattggtcaactatctcaagcaaagtgttgaagacagcaagaagcttgaaggcgagtcacctatcaagagtgttgtgttttccggatggacctcgcacctggatctcattgagattgccttgcaaaacaacgggcttgatgggtttacccgacttgatggtactatgactcttgcagcacgcacaaaggccctggaggaatttgccaacaatgacaatatcaaagttcttttgacaaccattggtgccggcggtgtcgccctcaatttgacttctgcctcgcgcatcttcatcatggagccgcagtacaacccagctgccgttgctcaagcgattgaccgtgttcatcgccttggccaaactcgccccgtgcaaaccttccaattcgtgatgaggggcagcattgaggagaagataatggagcttgctaaaaagaagcaggagatggctgacacgagcttgaaccgcgtcaagcgggacaagcgcgagacccaagaggctcgcatgcgtgaataccgcaatcttttcaagtaaattctcctatcttttgttttcttgccttagctcgcattcttttcatgttcttcggttctccatttacgtctgcggtttctttttctgcttccatttgatctttttgtgatcttttttgattttcatttctgccctaatgctagtggctcgctggtttcgttttgtgatacccggaaaaggagaaggcgttaacattcattattacatctttgattctccttatgatcatacaccgggcgttttctttctatgtttttctttttacaacatccaagcacgtttatacacgggtttgttgttttaaccatagaaatcattttcttttctgcatatgccatttattggcttcagcatattcacatgcattagattctgcatactttgaatttgacttccaagggggtgtaggactcggatatgatttctgaatagagtgggatcgcgtatactcttcttcgtacggcgagatatgaatagaagaatttcccgtctagacctcagaatagtgcaatgttacgaacgagacttttttatcctactagggcatattcaggcataaaccctgtaaaatcaggaaccttcgccctccttttttttcaatcgcagcggacacatcgacaggcatgctgttttcgaaactcgcgtgcaagacttctccgttgaatttacctagaagtacttgagaaagatgtatacctcttcctcccgttcatactcatggtttctcccagctcttgtgctcgatttggtacctcccatttctttcagcaacataagaaaagtaaaaaatcacacttcccaatgacgcctacttggccaagatacataatcagcatcttgaggccattcagggagtatgtgttcatgattttgaccaaaccatcacttttcccccacttctcaccattgtatcaagatcttcccggagtttgttcaaagcaaaatcatcattctcaaactccgcggtgcagataccttcaggcaatgcggctcgcttttcagggagtaaatttctctgaacggcacacgaatcgaagtcgataatcactagcctatcatggtctcggtacctaaacataacattacgtaggtgaagatcgttatggacaagaccaagggcatgaagatgatagatgccggccttgacgtattggagacaaatttcctggttgaccgagcgtccgtccctaaggcagccatcaagaatctcctcatacttctggaagcaaagcccagtaatccggccggcctttaccacgcagccaagatagcgggcgacgttctcatgtggaattttcatcaaaacctcacagattcgtgcttgttggagtaggtctaggccgagtgatgctgagtcgtcgtagccagtgagccggggctgcttgatgtagacgtccggcttggcaaagtcgaggcattgtgtgagaccatcttctcgaggcgggattgatcgataatggagagtagatcctctgggcgcccgactatatcggacacatgtatccaaaactagtcgtcgccatcctggaatatgacaacgatatatagaaattcagggtggccatcgaatgcccagcgctctgccatagaatgataatgcatcttaatgagacgagacagtgttgacagttctttctattaagagaaaagaggagagaaaacctggaaggtgtgtgctgtgaagaaagatcatgggcacggcgcttatttaagtacttttttggactaagaaatcttaggtgataaagcatcaagcgatgaacagtattcagggggtctattttaatatgggctaagagggtggcagcaggtgctgttacctggtggattgccaggcccaatccctacaaaatgacttgtatataacattgaaatggtactatcatgtggtattcgtgagttattcatgtgtctgtgcaatcggtaaaagacccccccccctcacatagcgccgagaatatagcaaaaataatgaaaccccacgccagtcctatctgtctcgtataactcccaaagtgcacataaaccatatatcctaagaacacatgatcaattctgagagtacccatctccatggatacccaccgcgacagcaccgagaacatcctccagccgagtccgcaactttctcaactcccgcactttcgcagcgcgctctttctcaacgtctctgagctctgtctccagttcccggattctgctctcttgctcggcctcggaagcgccaattccaggaagcacagagataaggtactcgatctgctgttccttgataatcagatcgcgcgcaagttcccgctgccgactcgcaaatgtgctgggtgagtccggcgcgggaggaaggttgggatctccaccttctggtgctgtccccggtgcagctccgggttgttgagggggtgcaagcgggggtgatgcatttccagcaacgacggctgcaccccccactttgtttgcgacggctgctgggaccggtggcgaggacgagttcttggccatcttggctaaggctggtgctgcgtcggggacattaggcggtggtgttgtaggggcattgtcgtggtatgttgtgagatagccaagcgttgcgtagaattgtgttgcgagctattttgtatagtgagcaagggtttaaatgtacgttctgctcgattcattttacctgatccaggcaagtctggagctgcgtgagaatgtcagccatggtagcgactcgaaaagaaaatgaaacaagcttgaagtagcttgagaaagatcggcagaatgcctgaaagaagcggagcaaatgcggagagaagctctaatgcggtgaggcgggcttgtctttctcacatcactcaatgcgcctgttgcgactgcaccatggccttgctgccggatactctcccttgagagtcagacaagatgcccgtcgttgcttttccagctccagagtttataatgagctgacaccgttcacccgccggctctttaaactcccctcggccccatctccgccctcgcaacaccacaatgatttgacgacatttctctcttacgcggagcatatttctcttccggtggcgagttcggtacatgtcggcacacactacgagtataccgttctcaaaaccctacgtcgttatgcgctaagcctcgaccgcatcggcggtcgtgacgatgccggcatcgatctcgttggcacttggcacctcccggagcgggaacgagaacgtgcactccgtgtactggtacaatgcaaatcactgaaggccaaagtgggccctaatgtcgtccgcgagctagaaggaaccttccgccaggcacctgtcgggtggcgcacgggcgagacggttggcgtgctggtgagcccgcgcgaggcaaccaagggtgttcgtgatacattagctaggagcacgtatccgttgttctggatgacgattgaacgggacggaaccttgaagcaggcactttggaatgcccgtgcagaggaacttgggattggccctctgggtgtggaaacacgatatggaaccacagaagacgccgagtctggctcgattacaaaagagatgatattgacctgggatggatgtgatatccccgatatggaccgcgtggagcaaaacctcgtcgagttcgccgagcaatgggtcgcattctggggtatggacttgtcggaaatccagaagggggagcttctggatgctgcagaaagagttctcccctatgatgtctcttctcaactgcttaataggaccgtatcggatgcagaccggaagaaggtcattcaagctttacaagagcgcctacaacagcagccggcatcggagtgaacactctactacccgacaatatgctatgtccaggcagccatagagctgaaatatataagaagaattgtatcactcatgacagaaaataatccaagggtatagaaacaccaacagcgatagaaaaacacgacttccagcctccaaagaaaaaaaaaaaaaaacgccagagagcacagacacccacaaaccatcgatcggcatgatcatccttgcatcgttgaccagaagtagtttgcgtagaagaagcgggagaacttcgggtcgatattaacgacatgaacatcgcccttgcggctattgcgaatgaccgctctgttgaaattacccgcctcatcgggctcgatatcaacaccaagcgaacggaatatcttgaggcgcagactagatagatattagcaagagtatcaatccaagaccgagacacaggcacaaacattgtcgcatcatcagcctcacgctcgcgccgagttgtttcgtcgccctcgagaccctgagactctaggtcgaccagtctttccttaagcatctccagctcgctatccaggcgctcgctttcaatttctagctccgatgcagctttggcaatgcgaaacttcttggtgtccaactctacaatctccgccgcgtgtttgcccgagtcgtgtacggccacggcttcttcatgctgcgtagatagagaattcaagtgacgtgaaagctttcgcattgccgactcggcctcgcgaatgcgcagatcgcgcgattgctggagggttgagagggagtcattgatgcgtgtgatggcttgtttatcggggtggatgttgaagttgccgatcgtgtggtggatgagctgaaggcgtcagtgaatttcttaggcctaaatcatgagagcaaatagattagcacatacagttcctgggtcctcgtcgagcaacatggtgtcggtggttacaatatacagatgtcgggatagtcggttgttttgggtttgttgcggcagcaacagccacagcacagccacatatgttgctcctccgcaaagtgacgttgagcctgtgatttctccgtcctcgcttttgccttcacgcccaacgtgaccacgactcttactttcgacaaactacaatcaaattgttgaaactttcgttctaatcaatattcttccgtcctaaccaccaactgcatatctcgccatgtccaatcttccatgtaggtggttccgactgattgcctgatgcctgatgtttgaagactgacttgctgacttgttatgtcactccagacgctgctgatgcggaaaggtttgttttccgcggaaactccgaaagaaaatatcggaatcgtccgaactgacttgactatcaccgacacagtcccttgaaacccgcggagctacaggtcctgagagcccaatacgagaaagaaggcgactatgtcgggatccagacaaagttcaactacgcatgggtatcgtttatccagtcctgatcaggtgtgcccgcgctaaccggtgttccccgcctatgcggggttggcattgactatagggtctgatcaaatccaacatccgttccgaacagcaagaaggcgttcgcttgctttcagagatcttccgtggagctccggagcgacgacgcgaatgcctctattatctagccctcggcaacttcaagctagggaactacggcgaagcccgccgatacaacgatttgctcctggagaaggagcccgcaaacctccaggctgccagccttgggtcgctcatcgatgataaagtcgccaaggagggtctggtaggcgtcgcgattgttagtggcttggctctcgtcgcgggtatcgttggtagtctggtgatcaagggagccagaagacgataaacacctgttgaggattggcaggccacgacagcctaaagggtgtccgtctagagtataaccactttgtatatttttcgtgtgggatctgattccttggccattggcgatctttttattgtcggagcatccgagggcgttatatctttttctctactctttgtctctctctctctctctttctctttttaagccataagtatagttgtggtatgctacatacttgccaaaattgtacatgacccaggattcatctcatacatgcatagccctaggttcggtctagtagcacaggaatttggtcacatttatagattgctgctagtatatatctcagcatcgaaggtcacaagatgtcgattgtgtcaatcactaattctcttcaacccgaacaatctttccagtctcaacttcatacacatagcctgtgataggaacatccaagacaagaggactatccttcaatatcttaatgtcatcccgaacactctgctcgacatccttgaaagccaaaaacgcaatatgatcggcgttctggtgtagatccgcacggatcttatctttgaggtcctcgtcggtaaaagtgagcattccacagtttgtctaaaggtaatcagcaattggtccaaaagttgacaagatgcaagccagggtctaggcttagtcttggtttgtaggggttgcgtacatgatgcacgatgacgatctcgcgggtgccaagcagctgctgcgagatgatgacgctgcgcagtgcatctgtggctctgccgccggcattgcggattacatggacatcgccttcttcaagaccgagggcgcgagcgggatctttaggatacttaggtgtgagtatcatccatcagaagtcagaagtactgcggagtatacggaccgaggcgcgcatccatgcaagccaccacggctgtctttctgaaatacagtcagatgtgtcttttgcaggggaccggggtaaaagttggagttagaatgagcgtcatcgacgtaccgctgtgggggtagctgcaggtcgcccttggtgaaggatgcggcgtatttggcattggctgcttcgaattcctttgcgacagacatgatggtttcagtatacttcaaatagattaatttagaggaccttggggtttgagaattgatatttaaagaacccggagaccccgcaaaggtgtgatatggcgaaagaaaggcaacatattctaccaatgcttggatggcgcaataatcttcagtccctgttttctgtcctaatttggtctgaagaatctttagttcactcgacatttgccctgtctgaacttgtaaggctagccctaaaaaggactactcctacacctgttgtaggcagtatcgccaccctagatttgacctaattatgactgctggctgcaatataagcgtggttatgaacgtctctagtgattgttgcaattgttgcaacttaatcaatgctaaatatagacaatatcaagccttgaactccttcttcgcaacccgttcagaaagctcacgcaagacaaccccaacagattcaaaatcacttgtctccaagtaagtctggccactcagacgagtccatagccaagggccatggtggaagactggcaggaaagtgttgtgttcgtccgtcaactgcgtctggatccaagcagctgccttaggagcttcttcctcagacaacacaaccaaagcggttttgtcggaggattcctcatttccggcagaagcaacagcaataggcaaccggactgtagtcatggcacactggcgcatacggctctcctgtccaggcttcagatcaggttcttgcaagacatcggtaccgagagcggcagcaacagcgtctgcgccttcatttgcgacacgttgggtgtaggcaataatagcatcctcgcctccgcagacttcagcgcggaatttcaacgctgctgcgacgcaaatgtacgcggagtcatcagtggtggcgacgaactcgaagagttgctcaaaggcagtctttgtcacgggagcgttcgggtcctgcagcaccgaggcgttaatcgcgggagaagccggggctgggataaatccccaagatgttggcaaggtggtgcgcataagatgctggttacgtcgtggaacgtagaggactgcacagctgcggggtgtgtagagccatctttatgaagccgagtcaatatttgtaattttgctgaagttattggaaaggatagaatactggggatagttcatacttgtgacaatttgataccaggtatattgaaggcttctattggtcaattgacattatcaatcacgatggacccactttcctctccttaattcatactacaacatacaacagtctacttttttacatgttagatatttacaacgtatcgataggaagatataacaactctaataatcacgttggggctagatattggcatgtcggagtataggatactcaatctcgaatcaagttcgaaagaaagcggcgactcgtgagaaagaccctccttgttagatgcgccctgcagacgaagtccatattatcactcatgtatctagtaaattggaagatatttcgatgactggagatatattagggcagtcagaattagtaaatcatttagcttgtcacgatcatcaattgcgatatattctaggtcttgactcacacaaacgagatattttagggaaagcattgcccaggtggggtgctcgacatatgtcagtctaacagattaaaagaagtgacaaagaagaaagttatagatggctaatattatctaggctctctgaaaaaccgtaccgctgcacttcttacccatcgcacccaccatacacttgacctctccatccatgttagacctatcagaaagcaaactaggtcaaattgcgctatactgtccagttgaactcaagcgaaagtactgtacaatctctcgcaaacacgatacaacaattgttgagagaatgtagatataagaggctgcattagcttccttactcctcacccatatcctcgctgtatgcatattcgctagtaatatccccgtcatccccgttttcgtcatccgcatcattgccaaggatgtactcgttgtagatagactcgctgtaggtgtactcgctggaggtatccgcgctgtatgtgtgctcactgtgggtaagcccactgtagggggactctgaggtcgcttcctccgtatccatattctcgtgattcgaatcctcctcatccgaatcctcacccgaattctcatccgtgtcctcctctgtgtcctcctctgtgtcctccccatccgaataatcactaaataaatcctcatcctcatccacctccgacagggccatgattttctcaaactcgatagattccaagtttggcaacttttcagatagagcctcaaagcccgcaatataaataatggttggtatctcaactcgaagattcaacaaccttgggaaaagcttctagacgtacacaagcagcggttagttatatcctacagcagaaggatagctattgaaacaaaccggaatccgaccagtaagatagtcccagtggtgaggaaatagttggatgggcgcattccaacgttcgatataaagtgtccggagatttggcatatttaaagctggggcacggatactctcttcggtgctccagccgcgaaagactagagcaaggtacaaagtgtgtaaattcgggaagaccaaattttctagagctggttgtaccactgcttcagtcttctggctgtatgttttcacagttgcaaccttcataaggtcggcatacatctggcgtcggtccggggagacttttaccatgacctcgtcgaggtgcatcccacctgatatttccatggagccccataatatacgtatcgcttcatggaaccacgtcttattcaccaaggcgcaattcaaaacccaacgtgggccattcgatgtgtatttgatccaaacgaggatttcacttactatctctggaagagctaaagctcgatggccactgaaagtcacaattttatggctcatgttggaaaggagtcagaactgatattgcgaaggaagaagtagaaaggaatgatatagtcacaaatgaaactaaagtgatgatgttgtaaaggatagatctctcatcaggaatttcctccaatctcacagatggctccgtgaaagaaccatggatcacatttgtctccggttcctgttctgatacgtagggagtaagtcttctcttactccgtatctctttttgtttctttgatttccgtgagaccctggtccatgcctaatgtttgtttgaaatgcttacagttgtctatctcatgatggagattatttgtattttacttttctgtttcaacccctcatcgtgatgatcctatgaagatagagtgtactccgtaccaaactcaaagccccgttgctattttgggacagaaatctcagactatgcctattgtaccagcaagatcctgttatagacgtaagttgcgtctttatcctttttgaaatcgtacatataatgattcccacataggtgagaattttaactgtttgtatatatggagcaatagggcgtgttaacaaaaggactagttataggtagtccaagaagctatgaatgtatgtagagcacgcgtgtctcatcaatcgggtactcccattttggcatctatgaatggtaaagtaaagtgtaaacaagaaaagaggctgcctctaaccaccccaatgctgcggctgtttcgttagccgttgaagtcatggctcatgtgtcatgtccaataaaaatataaaccaacgccgggtccaatgaagtcatcaataataatacaaacgctgaagcgttcaacccaataaaataacacactcaaaagagcgcacaagatccctgcatatcaggagctggtgtggtcccgaaatctcaacgccaaagcgggaaaaggcaaccgaataaaaaggcaatgctgctgacataaagcggaaggtagactgtgggggaaagattcgatattaacggacgaatctaatcagaaaggattcgggggattgctcactcattgagtctccacctggtggcttgttttgaccggaaccagactcccagtcatactgggatcctgtcgacgaggccgaaggagagtcgctcgctacccagggccaaacatttggggttacccagcttgtggtttctttgtgggttccactccagggaactgggacgctgtcgacggtcgcagtaattaaaggtgcggactcggtcgacgtgggctcagcggctttgttgccattgactttgcctccttctgcaacaattgactcccatgagccacttgtgtcaccatatttgtacgaagttccggtggagtaatccgtcacggtcattgacttcaggtacattttgaaggggccttgggtatagtctgtttcaccaccagcccagtctgcacaaacacaagctgttagcaagcacgatccaagtaattttcaggacagccccactcaccaattgtgccctgggcattgtttgaatcaccgccagcccacacaccgaccttgatcatcatcgggctctgtggatactggttggtgtctgccgtctcgggtgtgagaacacggacagtcttgccatcaatcgcccacacaatctgggtgctggtccagtcgatggagaaagtgtgaaattcatcatggtttccggcattatcgtggtaggcgccacggctatatgaagtggtgtctcctttgccgaagtaattggtttgcacttgagcgttgtttccgcccagccactcccagtcaatttcgtctaaatcgtcggactgcagaactgcactgctcacgattcccgtgcctgctgctgccttgatagtgcattccacgcggccgaacatgatgtaccagccggactgaatcagcgggccatcaccctgcttcgaaatagtgaaggtggcaccattcgttgagtcatatgtgacggatccagtggacttgaaagcatccgatgcaccacttgtgaaatcgaacgtcttgtcagattggccaaaggcaggatcagcgggacatgctactagctgttagtgacctgctgacacaacggaaattatgagcctcacttttcttggtcggattgcaatccgtataagtctgggccacgaccagcgtggaagagatcaggcctaaagccgcaccaagaaagaaccgcatggtgggccaagtcgagtataaactataagtaatcgttgactattatgcaataatgaagatgagttgttggagttgatacgagatgggtgacagaggaaggaagaagggcgaaaaggagatttccaagtgaagggagtaccccgacggtcttaagacaatctgagcaggtgccagcctcctctgtttccgtgccttccctttcggtcgatatgtgggtcccggctgtcattgggccaatcacatccatccccggatcgagattgtaccagctaccgagagcttcgccacgttgtctccatggagtttacatggagtcattctatgtagtcccccgtacattcgacgggtgtgcagctcagatgccaatgtgcaacagttctagtgtgcactgcatgtacaatgactatttgtgtgacaaacatattcgattgggtatttcgatcgagaatacgtacggggtacggtccgcactccatacttataacatatatatccattcgatgagaatagtctcctgaaagagcggcaaggcccaagcaaaacaacaggcggtaggggacacacgtatattaggacccacaatcccagcctctcgaatttactcttgcctattattagagatgtgatctcatgttgaagattttctctgcatgacagtgattcataatccgcctccatacggagcccttgtctcctatccgaaacaaatatgtgctaatactaatcaatagtcgtgattccaatgttcgggccagggctacctaccattgggcagccatctttcattagttctagcggcctgatgaatgatatgacttgaacgaccaacctgtaactttgacttaatgggcactctttgctgacctagatcttggtcgacataaagccaccgatctcagtggcgatcgatgcaagggcgatccgttgggcacgggaaaaacatagaccaatgagtcctattatgtttcgctaatgacttttttctttggctaagtatgaaaaccggaagaagaaggaaaaatcttcacaaaagcgaaagactactggtacataagaccgtgggccataagagatgccgtttgaacttactgtaatcaggatggtcggagtatagggctatctttaggacgcaaacttcttgcggtgagagttgttgatgagctttctaggtttttttacgcaatcaattctatgctttcagctactcgcaacgttgctgaatagatttcaatattctcatccgaaattctaacaatgtttgacctaattgccggcttttctgtgggcacagtcctgtcgaaaagactatgactactactcttcaaaccgacatgaaatcaacaccaattccacaaccgaggctcgtgcaaatatcgagttaggtctagctatatcttaggttctagatcaggtgtggtgttaacatataaagttccgagtgattcgacgcgggtttgtaacactgtcagttaaccatttcgactttgaataagcgacaatgggcacggaaaaatcatgctgctccactcgtcttgatctgcaggtgccgtggaatagcggtctccagcggattgctagacccaccttttagtgtgttgaatcatgaaactgttaggaagctaggctatcctacttaaattacattgctagactcttacattcataccgagtatgagctcgaagattatgctaaggtagtgtcatgaccgcatggacacactttcgacattccgctgttactagaatagcaagatgtagatgaatggtcttgtctaggaactggcttagagcgtagagagcacacccaggagatataatgtatgtctagggctatcgtttacgactagcaatataccctaagagcgtatttgatatctagatatttccaagggaaaaaaagcgtgcttcatcttcattcgttgcgcgatcgaggttacccgaactggttttgatctagcctacctgtatctcagggctgttctaagggcagggctattatttatactactgaagctctgtgtaccataatatcataatcgatgggttttgtttcgtaaaattatcctatccaaagtactccatatcttatagctggaatggatatatcacaggccggatagattgcaacgaagggaaaatgagccgtgcaacggttgcaatgcacttcttggcaatccaagctatcaccttctagtgaggccaagataaaatgaaaatatgagtaaaaccgtggaaatgctacaaggattgtttgttacagcctcgataacctcgagagtggaatcaccccggggcggggatgacggtctaatgactcgactataccccgtagaggcctatgcaatgaaagtatgccacacttgtatgctttccagagattttggttactttgtacaagctatttgcgagaaaatgcgaaaaaatagaacagaagactgtaaaagtcaagcagaataaagacgggggagctccacagcctagcacggacagcatcacggaccatacccaatgagaaaggttatatagtatctataaaaaagacctcaaagagaagaggtgaacaagggaagaaataaagaaatggaagggaatacaaagaatagtttcaactacatgcacctagtcttcaagtaatctagttactagtttagggtgaagatgttcccaaggtattctctcaagcgaagttgttggcgctaagagcctcatgacttccgacggcccagtacccgaagctcacacagggttattcttccatctctcccttattacatgaatctcatgtcgagcttcggtcctttttgatttttttaatagggatcttggctttgctctcgatcgtcattacgttgatccgcctttgtcacgagtcacgactatccccactctccttcttccccccccaattaaccctggacctcaataatcaccccgtacgccttgccagtatgcgcccgggttgcccttaatcgcaatcacctcctaagacctcatgaaataacgcctcattttgacactcgcgcccgacgctagtcttacggcctcggtctgcctcagcttttcatacgccgtcctccgctttcctcacgcccccgctagctctcccaactcctcgcgcccttggtgccacctcactgattttcctcgtccgcaattcaaattggatgtcctacggagtgtattccagctattatactctctaccgcgtcgccgggtcggcctccacaacgtggcgctagcacccgagacagcagaattgacaaccacacgttgcagctcccccggtcacccacaccatccgataaccatcggtttttttaatgctgggcagttctgaaatattaccatatcccaaggtaaagctggctgcaagttgaacagggttgccgtcgtggcattcggccgagtctgagcgcagccatgccggcgcgggaccccaaccaaccggacaaccgtcagggttcggacagctctgcaaatagttggaggtcgcaggataccgtgcgacactctgagagctactctcgagatggagatgaagcctttacgggaggccacaatgccgacacgtttcccagttccttgaacatggaccccaagtaagcttctgttctccaaatgacctgctgactctctacgcggtcatggcgcgttggatccaagctcaaaaagaagaggcgctaagaattctttattttttttgccaggcccgactcctcaaaacctccgaggattgattggggaagttccatgtggtcatggaattcccccgatatttctcccaccgagcaacgcaaacccgctggctttagcaatcaccgcgaggctttgataattccaaacaaccgagataacccgtctcaatcatctgtctcgagtccccgacctccgccccttcgctcatctcgcgccgactccgacgagatcgagtcaattgccccgtggtccacagtccccagcagtagtcagcccgatgctagcggtactttctatcatgattactctgaacatgaagcttcgcctgcgtcaaccacatttcgtcctgcgaccggacgcacaattgcgagcgaacccgctgagtttgaatcccatggggaacatcgccggccatctgctgcaagtgcaaccacggtcagtagccagggctctagatctagtattagtcaaaaattccgaaagaagcatttgaaaggcttacttggagatgactatcatgcgcctggggaggatgacgatggctcccagaacccaccaagcaggcgtgggggaccagtcgaccagttgaaggcgcgagagagggcgaactcagatggctcacgcaatacacccgaggggtccaacgcctcgcaacgttcccaaaagtcacgggcaaataacccgttgccctccagtgacatcactccatgggattatcagagctttaatgacatcccgcagtatggggaggcaccagtgcgccatgtacccatcggccccggtggtcagcgtcttccaacctcggaaagcggtccttcggggcagagggacccaagcagacggggacctggcaggcatcgttcctcacgaagcaaagaagagaaccccacccttgctggcgatctagcatggtcccaaccccgacctgctactggcagagacgacgttggaccgcggccgtttaatgaaaactacctgcattcagcgactgacatgaacgactccactgcgtttgggggcaggtcggcaagtccaacacccagtgtgcgtagcgcataccgagaccccgatcagaactcacagcatcccagactcggcgggttcatcaaaaagatcctcgggaagtcgcatgacaaatcaaggaactcttctcccccacgacgtgataggcaaggaagcctcgaaggaagtacttcctctcgatacgcagagtcagtagattcggatcgaaagaaagataccgggaagggtttgatggtgggaagaaagcttggtaatcgtcgtgtgttcactcaccaaggtggtggtggtgacctttataaccccaacaaggacgagaaaactcaagaggagaacaagcatttcttccaccttgatgtcgatatggaaaatctgaaagggattgtccgtccaccctcgcccgggcaaacgaagcgtggaagggatggggcaatcacgcccggcgacgaatctaaattcgaaaagccgtggaatgcgcctgaaagttggcaggtcagggggcccattgaccctaccttggaagatcctacctcggaagaacccacccgcgtcggtcctcgtgatcgtgagacttcgtactttattcgaatcttccgaattgattctacctttgccacgctatcggctggtccgaatgctacggtgtccgaaatcctcttgatgcttggtcgaaagtctttcttgcaagatcatctcaacaattatgaaattgttttgcgaaaacatgatctttcgcggcaacttgaccacaatgagcgacctattcaaatgcaaaagcggctgctagaacaagtcggctatacgcaaaaggaccgcatcggagacattggccgcgaggatcacagttatctctgtcggttcatcttcttgccgacaaagcttagcggttacagcagtctcgatagtgaaccaggtttcaacaaagtccaaaaattcagccatgtggatctccaaggccgcagtcttgtcactattccaatcacgctctacgcaaaatcctccgagatcatctcactgaacttgtcgcggaatttgtcattagacgttcccagagactttattcaaagctgtatcaatctgcgagagatcaagttcatcgggaatgaggctgcgttcctcccacacagctttggattagccagccgattgacctatctagatgtgtcaaacaactgcctcgaagacttggatcatgcgggtctcgagcgactgactggtcttgttagcatcaaaatggcgaacaatcagttaaccaagcttcccagctctttcggcaatttccaaaacctacgaagcctgaacatgtcgtcaaatagtttcaaggtcttccctgaattcctttgcaacctcaagagtctggttgatctggatatcagcttcaatggaatagaagaacttcccaatattggccgcttgacctctctcgaacgcctttggatgacaaacaacaacttgagcgggcctctcgatgattccttcggggaattagtgaacctcaaggagtttgatggacgcttcaatgctatcaccaatattgatgctctctctagccttccacgactagagcagatattctttggtcacaatcttgtatcgcgtttcaaaggttccttcccgaggttgcgaagtctatatctggatcactgccctatgacgcaatttgatgttgacgcccctatgccaaccttgacctctctaaacctcgcctctggcaagctctcccaattcagagatacaattttcgagaattgtccgaatataacgaagctcgtcctcgacaaaaatcatatttcctcggtttcgcctcagatcggcaagttgcgtcgactcgaacgcttcagcatgatcaagaaccccctatcatctttgcctccgactatgggttgccttgcagagctcaagcatctcaatctgagggagtgcaatttgaattctctaccagccgaaatttggcattgtgccaagctggaaatactcaacatctcctccaacattctgtcgtcctttccaaaatgcggtgctccgtaccctcaaattcccggtgaacctgcaagcacacctgggactacaccaggcatcgctgaaaaccccagctatgaagatgtaggtccactggatgaacaaaatctacgtcgacccagtcaaacgtccaatggtggtctgaatcttgtgtcaccgaacgggcatcggaatccttcaactgcccaatccactaggaaggtatcgggggcatcaccatcatacaccgaccccaactcggggcatcggaaggactcaaacttctctcagcaaatggcaatgacgtttgcggcgtcccttcgaacactttcacttgccgacaacagacttgaagatgatgttttccgggaactatccttgctcccagagctgcgtattgtcaacctttcctacaatgacctgacggaactaccgcaaggaattctcaaaaggtggccattgatttcagagctgtacctgtccggtaacgagttgacctccctcccatccgatgacctagaagagggaagcaacctcaaggttcttcatatcaacgcaaaccggttccaagtcctgcctgcagagctttgcaaagtcagcaagctttctactctggatgtggggagcaatggactcaaatacaacgtgtcaaactggccttatgattggaattggaactggaaccgtaatctcaagtatctgaatttctcaggcaacaagcgtctagaaatcaagccaaatatcgcctccctgggtcctccggccgccaatggtgccgacctgactgatttcaactccctgactcacctccgtgttttgggactaatggatgtcacactcaccattcccacaatcccagaggagactgaagatcgccgtgtgcgtacatctgcctcattggctggcactctcgcctacggtatggccgactctcttggcaagaccgagcatctatctattattgatatgattgtcccacggttgaagcaggataatgtggaaacactcctgggaatgtttgacggacagacactttccagtggtggttctcgcgtcgcaaagtacttgcacgaaaatttcacatctactttctcgtatgagcttaagaagctgcagcgagatcacggcgaaacaccagtagatgctctccgacgagcattcttggcattgaacaagaatatggcaggctctgcctacagatccattgatgaccgtgagatccggcagtaccatcgaggatcgactgcggccaaactgctcaatcaggacgacattcagtcctggggtgtcgctactgtcttgtatctgaacaacatggacttgtacgccgctaatgtcggtgatgctcaggctattttgatccgttcagatggttcaatgctttccttgacgcaaaaccatgatcccgcggaacctaacgagcgtgcacgcattcgtgcagcgggaggtttcgtgtctcgcaccggaaagctgaatgacgtactcaccgtatcgaggtgcttcggccacttccctatgatgcctgctgtcattgccgcccctgccacaatgcatgtcaccttgacggaacaagatgagatgatcgtgttggcatcaaaggaactctgggattatgtcactccggaagtggtgattgacattactaggagagaacagccagatttgatgtttgcagctcaaaagttacgtgatttggccatctcattcggtgccaccaacaagctgatggtaatgattcttggcgttggggaaattcaaaggcgacgcccaaagcctcgtccttctcttagcactgcctcgtccacgtttgctgaggagcagatcatcccaactgccaagcgtcccaagaagcgcgatggtcctggagattcgcgactcgcgcgcttcgaacatgtgaatgctcccgggggtgaattgactatcatgttcactgatatcaagaaatctacgggtctatgggaagtttgtccggatgcgatgcgctctgctattcaaatccacaatgacatcctgcgccggcaacttgcgatcttcggtggctacgaggtcaagactgaaggcgatgctttcatggtggcattctcaaccacgacggctgccttgctgtggtgcttcaactgtcaaaaccagcttcttgaggctgagtggcctacagagattctcgatcagccccagtgccgagttgtggtcgacatggacaataatgttattttccgtggcctgtctgtccgcatgggtggccattggggcgagcctgtgtgcgcgaaagatccggtcaccagtcgaatggactacttcggtccaatggtgaatcgtgcttcgcgaatctctggcgtcgcggatggaggacaaattttcgtttcctccgatttcatgaccgacatccaccgcagcctcgagattttcgcggatgctgagcgttctgcatccactagctcgaccgacagtaatcaacggggcgatagtctcggccacaacattcgtcgtgaactgcaacagctcaacagtcaaggtttcgttatcaaagatcaaggtgaaagaaagctgaagggtctggaaaatccggaacccctctaccttgtttacccctcctcgctttctggtcgcatgatcacttcggaagaatcacaggatcgtgatagcgccgttgcaactatcagcccagataaccaacttgacatccagacaaacgtcatttggcgtctctgggaagtcacactccgtctcgaacgcctttgcggtgctatggagcatccaagtgaaccaagcttcagagagccgaacgtcgctctgttcaacatgatcaagaggcacggaggtgagctgaacgactcgaccgttctcagtttggtcgaccaacaagtcacccgcatcgaggttagtatcacacaggctcccctttcgttctacttccaatcctgacaaattccaggtatgcatcaatacactctccatacgccatatgatgcgtcccttcaagccaggcgataccctcagcgatcacgccgtacccattagcgaggtactacagcaattacaaacacaacttgctgaattccaagctctcaaggagcagatggccgttggtgctgcaggcaacatcggcggtccaccatctcgtgatatgatgggtcattcagggagtatcgacagtggtattacctccgcgtcgtcatcttccctcaatctcaacagtgatctcaatcgctcttttgattctgggcgcggctaccattgatttctgccacctgctctatagcactaatttcaatcccactttggttggctttcacttccttcttagcttttcttctccttgattgtatctctttggctttattttggcgggcggcgtcccactggcgggagggtggtctgcagattgttttgtataaagcattatggcatggagccaaggtgattgttttgaaaaactgcttccgttattggctttgatctactttcagtttttgggctgtaattggctctgacagtggatatatattacagtctatgtgatactttcatgggcttttttcatatcattttgtttgatcttcacaaaaatagtcggctgcttattcggtatctgcccttgaaaatgcaggcctatagatctgcttcatttggctaataagggatgttgaatgtgacaacatactgacgttttttttgatgtctttttagatgtttatgggggagtgttctatgtataaccagggactatgtctggaattttcctcccatggacacctattaggttcgaggtatatgactttatcgcaaggactttgcgatatattattacaaagcctttttttacgatcacgatgaatccagaatataggtcgactttgactggactcgagcgcagtctttgatcttaattccttgctttgtggtttagtacacgcatattcattatattcattataatagcgctcgaagccctactgacgattctttgatatcaaatgccaagatcacagttgctggcctgaggcgccaacgtcatttttgaaaggtcacgtgccactgtttatgcgtgcgtcatcgacgctgttttctttatttcttggtctgctcacctcttcgtctggtaaacccactgcaaagcaaaaaaaagaagtgacatatgtttcttgagcttcttaactacccacatttacatcttcgaagtcgttagccacaaggtcggcttttcctgccccgcctgttgccctggctacgaactgaacgaataatctggcgtaattaacggcccaacacaaaaacaacacctctcctaccccagtaaaaattcgaaaaagggagcgatcgctggaagctcacttgcatattgcaatctcgcctagctacgcaccgtgctgcaagtttggtatccatcttacgaaaggcccctacgccatctcggtcggcgtcttctaatcaggccgcaacgtcgcacattgcacgccacacgaaatggcggatgaactggaatatctccatccagatttcgatctgaactctctcaccgtgcctcgtctccgctcgatccttgtcaaccacgatgttccctaccctgcctctgcaaagaaggctcaactgatcggcatcctcgaagatgaagttcttccgcaagccagaaaactcttgcgtgaccgcgacagggttcgacggaccagtgcaggtattacagatatgggcagtcggtctacatcggtggcaagcgacgtgaacgacagagagtcgatgcctcctccacccacaccctcaacagtcggatccacaagcagaagcatgcgaggcacatcgcgtcgcagcacccgtcactcaacggtagatacagatgatggtctggaacctgccacacctataaggaacacaaaacgcacgagcgtcgctcgctcggtgggtaaacacgctcgcacatctgacacggaaaccggcgacgacacactcgcgactccaatcgctgctacccgtcctacgcctcgcaagtctacagctagaaaaatcggacggagcgagatcctcccttcgacagaactggatgaacacactcgtattaagtcagaaccacgcaacgagagcatgtttacggatgataatccctttcaaagtggaagccctgaggcccctaaaagcgcaaggatgagttatgatggcaagcggaagagcgtttcgcgcttatctacagacagtccagctcggggtcgcggactcaggtcgcggaaatcagcaaccccgtccaacgttcagcaagacgatggcttccagccaccgaagcgggattcgtttgatttcgcctcccggctgatgcctccacaggaggaacctgaggaggaatcggatgaatccgaggatgatgaagggagcgaaattggcgcaggtgaagaattcacacctgaggaacagctcgctatgtctatggaggatgaccagtactcgccacaaattcaggctagacgacggccccaaaagcaaagcactctcagccgcttggcaccttgggtagtcatcctgtcactggtcggtagttttggtacctggtggcgcaaagaaaaactcgagattggatattgcggcctaggaaagcccacctggtctttggcagacactaaagttcctgaatgggcgaatgtgctggagccccggtgcgagccgtgcccaagccacgccttctgctacccagactttgtagtccgctgcgaaaatgatttcctgttgaagccgcatcctctcgccctcggaggcctagtgccgttgccgccaacatgtgaacctgatagtgaaaaggaacgccgcgtgaaggccgttgctgataaagctgttgaggagcttcgtgagcgccgggcaaagtgggaatgcggtcagctaaaggaagacgggaagggcgccagatctccagacatcagcgagccagagttgagggaagaggtggctaagaaacgccgcaagggcatgagtgacacggaatttgatgagctgtggaagggcgccattggggagatccttgaaaaagatgaagttattagcaagaccaagcagtaagtttcctttgccctaggatggattctcgtgtctccttggctatgctcgaggctctggatttcgacatccagccgcatttcttataaagatctggtctgaccttgtgtaccggaactgacagaggcgcgttcgcaatcacagaaattccgccatcctcatcctctcctccacctccattgcacggctcccactcgcatgcgccgtccgccgctacttccgactcactctcctcgcgtatcgactccctatttcacttttaatcatgaccatcggtcttcttgtgtacgctcgtgcgcgtgtcctcgcacgtcggtctgacattgctcgcgtgcccgaattggtagctacaaccctcgaccgactatccacgcaggctgcactatacgcccgcggtgatgccaaagaacctcatattgccatcgggcagctccgcgatgacgttctccgctttgaactccagggcaagcgtcgcgaggagctctggcgacgggtccgcagctttgtcgaaggcaacgccaacgtccgcgcttctgtgcgtgaaggacgtagcggtgatgtttctcgggtctgggagtggatcggtgggattaacgctgtcggcgagccggaacatattggccgccgtgagagtgcacgattctccgtcccttctccatccggtaatattgtgacaagccctcagacgcctgcgagtgaaagccagcccgagcctatttctagcccaagagagtctcgccgctgggacgagagccgtccgatctattgattcttgtcctgatgtctagaggatgatttggacacgcagctccactgtgctattctttttgatatcccaccgttttttcttttctcatatgagatatggcttttgtttcccgggttttcttgtcctgattacaaattttattcccaacttccttcacctgctttatcagaacatattcttttcctgtccatacgaatttcattatcaattccaatcagaactttaattttctcagagacagtcttcgtcctagcgctattgcatgatattaaaacaacggctgcaattcctacggatttggcggtgttagcgtcaagtcgaaccctccattgcatatcagcagcacaactatataactgctatcacaccgatgaaacccaagggcgtaatctagggaaacctacagagtacatattcctaccaatgagtatagtactccgtatcattaaaagacctatgtatcagctgttccagcccaaccgcgaacaataagacccacattatattgctatactatactacccccatgcggggggtcgacggacaccacggcctaacggaaactcttgcttagtgtcaatcttaaagatagatctatatgtaggcggacgtgggtttcttttccgtgttcgcgcattaaattactcaaattagcgcgatcttcttctaattttatgcttagtagagagtaatttatagattactctgaatcatagtttacttacaataccatcttctgtatctggggtttttttagacgtgttcatgggtagaagaatggaggggtacaagattgacatctagaatttccgttaggccggtaacctgcaggggttggggttggcaaccttggaaggaccgggtagtgttcatgtacaatgtcgatcagttaacaagccaagtgaacagaacagaacaggccctggtatgtaaactcgttctatggggtatcgtgtgaccagtacgaatgagtgcctagacgcactctacggcgtatgcagataagaatatttaatgtactattttacccttggcattcttatgacccagccaggcacatctatagttagccccccatgtgcatgttcgacgtgaatctggatttcggtaaaaagggtaaagcgtgttcgctctcgctcttgaccgtctccatccttgatgcccaacgtatcgagctgatcaatcaatatccctgctagtttggtatttgctggcgtcaacgttctgcgtcagttctgcgttaacgtcctgacccagattgagtgaggggaaattggatcgtgtgtggggtttgtgttgagaatgttctgtgctttcattcgtttttgggtctataagagtgctggtattggtagaaagtagggccatcaaggcggggtcgtttggcctcagcatccaatgagatgcaggagtgacgttcgaggctattgcaagccgcgcgagtcgcgtatatcaaaagtgccggaatttggaataggaccagggaaaccaatctaggggagttgatatattagctgcttcgcttactagtggctactaccgcaggacttcaaaggattcatctgcaggtggctgatactcgcttcaaacatcgcttggcagatagctattgcattgcagcaaacaccaggtaatcaggaagagaggagctagtgatacgtgcatgcataggtggtactgtaaaaggagttccttcctacccgcccagccaaccagctctcatgtttgctcgggagaaaagggttctgtacagtagtgagacgagggatgccttttgtgtgcctggtgtacacactaccgtttggaagagaatatagccctacataagaggactcttgtggcgaataatcccagggttgaccgcttcttgagggtcatccaagggaagcatcctatcaagaagggctgggggtaatgaggtggatacgggcattatccgtacggagaacaccttgctccgttgtcttgaattttccttttttttttcctttttcacgaaattgcgatttcatctcgggccccgctctcctttaaaaccgagatacagtaactatagtaagtacgtatggtgtggacgactgcttcctccagggcaactcgggaagctcgggaggctttattctttatatggccgtaggtaatatggagtaagcaggattacatatagcatattcgaatggtttggacttgtaccggataggggccacgtagcgttgtggcaagatggatgaacggacataagaactgtgcgtataagcacagggctcggatagtggagatattggttaatagaggatggagaatagtatgtaactatgtattgatatggggtaagatttcagatattgcggatatgcggctagcagacggagtagttccggtgttcacctcgcttaagttatattgagtaagccccccgagtatatgcgagattggatggctagggataaggattgcgatggtttagcttgccgacgcagactcttcactcagtatgtgagccatggttgaatttggcaaaagcaagagttgcgaatgccttcttcttagaagctttcaaggtttttcttcggtaaaagcaaacgaatcatgtctggtacggaagtattctccccggggaattatcggatgtgaagggaacagccatgcctaggtctacgggggacggattttggtttcattttgtcttttacctttttttctccaaaaaaaaaaaaaccaaaaaaaagaacaaaagatgttaaagttcaaagaccacgtcgtagtgaaaatcgatgtgaagtctacatagtcaggaacaagatgatgatatcgaaatcgcccctccccatgatgaaccatgggactcgttggttccagacaagattgtggacctgtcaaacttataccagaaggctatgcatggtccgtattggacttgccttgtcccatttcattttgatatatccacaggttttaacatccatggatatagatacagcatacaatcggcagggtacgatttaccgtgcatatactccatatttgggacaaatttgaaccatgtgaatgggataagcaagggacatgtaactacataactagaatctgctaatataagtgccgtaggagcctcccagagcccagagcccagagcccagagcacggagaccagagcacagagccccgtcgtgaataccccacatatatatagtgttattcgtttcgtcagccgagggtccaatatcgagctactttgtatcgagggtgatcccgaaagatgttcccgttctcgttgattgatagtctacctaggccgacgaggtaattccggaatgggataacaaggaggacagaaagctagaaatcaagtgactttccagagtaaaagatcactggttcagcaactcgtctgtctttggttcacatgtggcaaaacacccgtggtggaggggttgacaacgtttcgcttggtggggtttacacatcgtctactgcatacagtatgtaactaacgtacgtgggcccgtgttgggtggaatttctcgtcgaatgggaatgtttcaagagatttagtatctgcatcccccgtatggatatgtatacacactagatcggcgtgcagaggagactggggcatttctcggagccttgcgcatgacactgcacatgagcataattagattagtgagagaaagagaatttctggtaaaagaaaaccagcatcagactctagatcttccgatcgacaaagtaaaccgagaaggtcagggatcgactgaacggcatagacccgctttttccaatcgacatagaaaggggaacctgggaaaagacgagtagaggaaccgaacggatgtcacgttaataataacgttgttacagaaactcacctgggtgatagggtcatgatttcatattgggagagtcgggttggttgagcctatcatttaccccggaaaataactccggggtcgagaaattagggttatggataggagcagtcggatataagcatatgaaggaactcaacgtaaaagatattgtcagaaagggtacaaggtgcattgtataatatccacgttgtatagacacgatatacggactcattcgtctgttgtttcgtacttcgtacctggctaataactccggtaattagcttcattctcaccattgacagcgagtagaaacggtactgagctgttggtataatttgtatttgactcttgacctttgatatccttcgatcaaccagtattttcttccttggaggctctccagctcccatcacttgcttattgtctggatatgcctggaggcccacatccgccaccgtcgaatctctcccttttccctgtttttttttcgtgatttttttctaattttgcgcatttctggacctgtttacctgttatttacatgttattttccgaatttcctattatttcccatttttccctccttaatatctcccatttcccccccacttcgctctcatctaggcaccgcacagtgcagaattcaactgcataggtctagcgcggccccagggcccctcctctctttctccattctataactctctctatgatctgtccgttttccccacgtgatttgctcgattatcatgctttgaaatgagtggttggaagacagagagttgggcttttgatttgctatttctccctttgcttttgtttgcgggcagacttgatgaatgaacagacactccgaggctataggcctcttgcgcctcgcaccaggctactcggtggatccggaggggacggcggagagggagggagtccttctggcgggggtgcaccagaagagaaacgcatgagacgagcctcgacggcttgtacagagtgccagaagcgccgaactagggtacacatctcactgcgcttcctattttccctatctctccccttgctcgcacctaatcagtactccaaatcaatctgacatgttcttgttgctatttttgttagtgtaccggtcctcccaattgcaccgaatgctcaacccacgcccgcgaatgtgtcttcgatgaagccgccgacaggcgtcgcaaggcctccgccaagcgaattcaggatcaattggaccatttccggtcattcgtggacgatctcatcgggctcatccgcgatagtgacggtccgtcggtacaattaatcgtcaataccatacgatcgggtgcaacccctggagagatccgagatatcctcacccgtctgttggacgacgataaccaatccgattcccgaaattcaggcatgcgcgactcggacgtgaacctgaactttaccaacaatcacatgggcaattacttccacccgccacgctgaattaccctaatcttctcctccggcaacatacgaacctttccaatatgcgccagacttaccgccgcctcctccccgaattctttacgccaaatcttctcgatcccaaatcctcaaacgaccaaacgaacctggttgtttcatagcgtttccttcatagctgttgttcgtatcgggtttgagatggagcaggtcattcaaaaaactgtcacattcataattcaggctgtgtgaccagctccatctctatggttgctatatctcgagacagattgagatctcgcaaaaaaaaaccagactgttcctgttctctcacccgagccctagcattacatttttctttttgttgcaaatattctttgcgcatcccagaatcaggggctttagaagcttgcaagattgcggagggtcttttgacagaagtgaatatacccagagatacccagttctagcttgtcacgttcggactttgttgttggagttacacgtcggggtgttatggggttcggagcaagtgtgattttcctttttatattgagcccctggcggatattcttccaacagcaaccatactgcaatgaatatctttcctagcctagggctttatccgcgtttctttgagagatgtgacccaagttcattttggtcactgaaatcatattatgtacccctcccctttgggtttgcgcaccagttgtcctctcgcgcagatcgaggctgctctctgttcatgttagcaaattgcactccaagatgatattggattcccgtaatcacacttggagggtccatgggtgatatgggcagctgatcacactattatattgttgaacatgttctgaagactcctatcaaccccacggacatgatgccagtcttctccaaccagcggacatggtacatgaaccctacggtaaaactgcttaccaagggctcatatagaagtattactctaacttagctacagggagcagagcacccacttcgtaagacgatatctatacgattttgacaagtgaacagccccttacctgaaagcccgatcagatatgatcttccttaatctttcttaataaccgtacctcacgtagattaacccatatccacacctatacttcaaatgcctcataggtacatagtaaaaatccggggaggtggaggcatccccgcgccgaccggagacttgccgagatcctgtgcttttcccaaactcccaatttccccctctccggatatttctcctttctcactacctcgaagtcatctccatctgacattcctcgggacttaatcccctggctcggcctgtgccgatctcgatatggaaaccactagcgttgccttgcacgaatctcctcggcccgcagtcaaacccaatgaaataacttcaacattgcccgcgtctaagaggaaagcatctgacacattaaaggatggtgttgcacagcgccagaaaatcaccagagcctgtgactggtgcaaagtaaagaaaacccgatgtactggtactctgccatgcacaagatgtacacgactgtcaatggaatgcaaatacaacgccgcatattctcggggactaccaccagaccctcttcctgtgtcaccgggtccaatttcgactcccactagaaatccggcatttgaagctgtggatgggcgcatatccagcttcaatttacagggcactggccgggacccggctttgaccaacaatctactttcaaaccaaagccaaagccagcgccagcatgtgatctcaccgcggcattcaccagaaccaggttcaacggattttgagggtaattacctcggtccttcatccggtgtgtcgtttttaaatcgcgtatggagccgtctgcatcaagatgaaaccgcgaacttcccagataaactccaaattgagtcctcgcggaatacagccgtctttatgtttggtgataagccttactccaaccctcaagacgcggaatttaccctcccgactctggaaaaggccctggagttggtgggaatatacttcgattactctatggtgacttatcgattcgtgcatagaggtaatgtagaagaatggactagacaggtttatcaaaataacatcggcctctcgaatctgccggtgggaaatatggttgctcggactgctatcgttctgatgatcattgctgtgagtactttgtacatggaaatgaggcccggggaaatgcctggggggccaggtgaaagattagaaaggtcagtaatctcttgatatcagaaaaggagcccagctgagaaattgcagtgagcgctggtacgcagcatcgaaatatatgtcttctctcgagtcagggccgccgcgactggaaaccatccaggcccggctaggccaatgcctatacctgctgtcatcgtcacgggctaacgaatgctggtactcattcggaacgacaatgcagattgtgactgcactcggattacacaggagggggccagccaaagtctcgaataacgggtgctcgtatctagaattggagcttcgcaagcgcatcttctggagtgtatacactctagataaatatctaagcattatgttcggaaggcctcgactgctccacgatgaggacatcgaccaagaactaccgaacgagacgaacgacatagacttactggaagaagacccaacgcgaagaacaggatctacggacagcatgatgattgcctctgttcttcattaccggtgagtccctcacctagcctgtacgtatacctgagcactaacatcgaacacagacttggtcgtatcctgggcgacatatctcgccaactatacagcataaacaccctctctcgcgactccccactcgagacagcaatccgcctaacctcagaactcgaaaaatggaaagaaacagtcccaccattgttcaacagcgtccacccgaccagtttaattccacccctctgccgccaaagccaagtcctccaactcgcctactcgcacgccatgatccacgtcacccgctcatttctcttaaacgatttcacagacctcagccgcagaccgaaagtcccgcacccgatggtcagctcgcacgtccataaatgcatccaggctgccgaggacatcatgacaatagtcgatggtcttgcgcaccagggtgtactgatccagtccttctggttcacacactacgtgtgtttctgtgctgttctggtcatttacatccataccatccaacagcaccgtaagtcaatgggcggatctagctcagcctctgtctcttcggtcggaagtccccgtgacccagataaattacgccagctcttttctctcgctgaatcttgtcagcaacatcttgccgaggccacgcgcaagaactgtccgagccgtcgctacgggattatcctggaggagttgagacaggaggttcatcggcagatatctaatgggctctcggttgaaactcaggctcattctggtgcaaatgttactctctatgtttcgggagagggttcacagaatacggatgtaaaatcggtactctttgatactcagggggttgatttcatgatgcaaccacccgatttgggaacgaatccgggtgatgatgcaggcttccttgagagccttgagggatcaatctggtgggctcaacttgactcatgggtatgtattatgcttttcttgacgatacgagtacggaatatcactcgcctatacacatcttgtttaactttgttctaggccttgtccaatctccctaatgatccctcgacatttagcttttaagcactggatcctacgagtcacaaagcaaaatcgcgttcaatttcagatatcctgctacagttcgtatcacattctggacattattccgtcaagacgctatccggtgtggcgctcaatactgcatgagaccaccgcggtgaatgttctccaagtagtcatcgaatttcgccgacacctcaatcacattcttgaggtgatcatacgtgagaacttcccttttccacttcgcgtactgacgagcagtggtgacggcattccgaatttgccgaccattcaacttctccttctgaagcacatccaagctccccataagattttcaacatcaacggcatcgttatcgaactcatcaaggcgcttgatgaaagtattccaaatgatccgtctctgttcctcacccagggggggatagtgcagtgccagctggatgcgcgacttgaatgcctcgtcaaaggtacctacccggttggtggtcaagatcaggattccatcgaaatactccaccacgcgcaggaatgccgacacgagcgcattccggttcagatcttccagaccgcgttgctcgagaaacacgtctgcttcatcgagcaagactacgcagttccaggtcttgcccaggtgtagcacggactcgaggtacttctccacctcctctggcttgatgccgacatcgccgcatgtgactcgatacagaggccgctcggctatttcggccacactctccgcagtcagggttttgcctgtacctgggccaccgtgcagaagcaaaataagcccgtttccttttccagcgatcagatcggcggagtattcaggctcgacgtggttggtcaccaatgcttcgataaggtctctcgatttggaatcgatggctagactctcgaaggcgtttttattccactcgacaggtgagatgcggtcgactgagagctcgaaccatttcttgcgccggagattgaagccagttatcctcggaggcatcatcatgctgaacggctcttgcgggggttgctccctggccatgactcggtcatcaagtgtctttctaggtgagctgttattcaaatacccggtcgaggctgggtgcagtctgttgtatgtcttcatatctatgatgtatcggtcatcggtctagtagcaatatttagctcggctcattattgcaggttaaacaataaacacataccatggtctggaagttctcttcctcggtcgcctgatatgacacgtacttctgcgtgcggaatgtccagaagatctccccacggcgctgaagcttccggacgatataatcaggcgcatacctgattgggaataccgcaagatccgtgatagcacactctttttctgagtcactgtggtgtagtggaaggctataatcacgcaacaaatcacccacttcaggcgacgatggcatctgcgtggcgtgctgtggctttgggatttcaaaactgagcttagtctgagttttatagaagtcgccatcgaagtcccaggtctggacactgatccaccaacaaggattgctgccatggatgtctgggcttctagagggccatccattggctacataacctatgtgctccttgtttttgtgcgaaaccaggacttcattgggcttgaatagatattgaacgtactccgggcggattttgcccttcttcaaaagcaaatccactgcagtgtattcattgccgtaagcctcttggacatagtccatgaagaggtcaaattgtctctgtgcctcagagctcagccctcgtttgatttccgattgtccagtaccccggttatggtagacgaagagataaggcgacctgacctcacccgtgtgttggtagtcgttgtacatggctcgaaactcttcgcccccgaggaagtctgcgatcacgtctttgagaccttcggaaactggaagaatggtctcgctgaatggctctggcttgccgtactttgtgttgggtgactgcggctcggctcttcttttgtagttgcggaagacaacaaaagatatctctctattgagcgcgaggtaaagctcgaaattgaccagagggtcattgcagcgcagatatggcgcacccatgtttcggtggatgagttcaggaggatcggtataaatccccatccatggagacgcgggtgtagacccgcgcggcctgtgtctggggctgaattcatcgtcactatcgtccatgctctgattgtcactcggataggtgccgtctttctctatccgataaaggatctgatactttgaggctgtgggcagggcaggctttccttccagctctcggactttgtttcgaagcgcttcgatttgagccttgaggtcattcgcctctgacagagagacgcttccttggctgggaggagtgtatgtttctgagcgaacggtgtttgagtactgcgggttcgtatcatacgaattcacagactgtggactcagaatctgttgccttgcaggagggtaaagggcgttggtatggtgaaccgggacttgagggtattgataaggcataggacccggtggaaaatggccttgcattttttgattgttgactacctgcccgaaaggatggacaggattattatgctcgactggccaatggcggaacgtagtcgcgttgtttcgtcgtgcgacgttctcccgttctaacagcatcagtttgaatgagtaatcttggttgtttttattttcttgcatcgttctgggattcggaatataagatgtaccatcaaggaaaggaggagctcttcctccgagggaaacatggaccgattgctcttgtgaggcgtctttaccagtcaaatcttgggagatggtgctttccatgtacagctcatcaagaggccgagctagaaatgattgagagtacattgcccagagatgacaaggatcgtttcaggacaaatcaaatggactgtttcactgtccagagggagtgggaaacagacaataaataggtgaaattggggggatacgaggagattttgatcccaaccgccccgcgtcttgagcctctggactgtcatgtgctgtggctgtgtatatgtgcatgttcttgttgttgggctggtatattttcatgtacaggtacctaactcttggatgttagtgtcttgtatatctccatgtttgtttcatcaagacgttgggtggcgcttaccctctttcgtagttgccagccctaataacatgggttcctactacagacaccggagctttatgcttcacattccatgattgatgcttcatacatctgattcaatatattgttaaagcctacgcatgtttcattcaacgctcattggctctggaaggcaaatatgacagcctccagtgagaaagatccagcccgacgaagtcttttcaatctcttgatcccaactaaagttgtcgtctctggaaagccagatacatctccaaccgattctgcggcaacggaaagcccagcatcggagccaattatcccaagggggggaaaagatcggctaagggctcgtttgactcgcagtggctccaagattctactgttgctaggcttacgtggttcatcccaaagtgagtgatggtgtctttcttgttatagcagaccattcactgactctccgcaggcaacaaagggtctagcgtcgacactgattgctgtgattcggtgcaggccgacgaaagcacaggtctctcgaacccatcctccccatgtggtaatggcgataatcgcccggcatatctgactgcagctgagtctgtacaaagtgaactattacctgccactcttttgcgcagcacccccacccagggggtggaaactttgtctaagccacttcccgacctacggccacccgagagtcagggtgagtcggctgttgtcgacgacgtgcagcaacataactcaagtggggaacccctgtcaactagtgtcactgaacagccgagtccaacaaattctaaattcgtcgatcgcttctcgcacaagatctcgctagcgtttggtcagcccactgtcatccgccgtgtgcatcttcggtcacgaccgagtgttcttcccgccaattctccggtattagacggtctgtgtaagcagagtgatggcgctaatgatagctccagcccatcaaccagccctagtagtggtgggtctcctgccggcgggcagtcaacttcactgactccgctcacgtccgtggggccgtctccttcctcagataaaggcaagctgcctgacggacacgaaactgcagtgatacattggccctctcttatcgagatcaatgaagctgccaacgcttcagacacaaatgtaatcacaatatcgccgtcgatcaaaactgtggaagcgacatcagtggcaaaagtttacttggaactatacttcaactccatttttcaaaacaaagatccccgtcagcaacgtcagctcgagttggagcagcatatctatgcgtttgagctcacacccgaggagcggctgatgacaagacacaactgggtcttacgagagaacgattatcttcgacaatgccgtgtgctcaaatcaaaccgatactgcactcaaaccgaagacgccatctccatcgcaggttacaaagctataaaggtattggggaaaggaagctttggtgttgtgcgtcttgttcgacggaatagctgtgattcaaggagttcccaggaagatgaccctcttactctcaaagacaacaatgtccacgctagatcaaatccttttggagctctgatgtctgccatggaaggtgccagacaaacccgtcgaaggtacatgaccggcgaaaagaaggaggtatatgccatgaaagtcatcaaaaaggccgagatgatccgcaactcccaggaaggccatattcgcgcggaaagagatttccttgttgcctctgagaactctcgctgggttgttactttaatcgctagctttcaagatgccaacaatctatatcttgtgatggattacatggtgggtggagactttttggggctactgatccgcaaagatacactccgcgaggactggacacgattttatatcgcggaaatgatattgtgcattgaggaggcacatcgactttgctggattcatcgcgatgtcaagcctgataactttctcatctctgcgtccggccatttgaaaatttccgactttggtctcgctttcaatgggcattggtcgcatgaccaagcttattataacagccaccgctactcgttgctggagaagcttggcatcgatgtcaagggcgattccgaggaccaagaggcgtctgctgaagcgaaagaactcgctcctgatataaagttgcacattgtggatgaccatgctcttcatcagccatcctcagcaagtttgttggattggagaaacaacaaggggcgacgcagattcgcaagaagtgttgttggaactagtcaatacatggcacccgagctcattcgcggtgaaatgtatgatggacgatgcgattggtggagcttgggtattattctatacgaggtaggtctctcgatattctctttttgtgtgtatgaaagtctcatagctctcccagtgtctatatggtttcacacccttcgcttgtgaaaatcgccatgatacaaagatcaagatccttgtgagtaccttcttttcccttgctccagtgaacatttcattctaagacttctcagcaacactcgagaactctacgatttccgcgggagaaattcacagacaagttagtctcacaagatgccatggatctgattatcaggatactccaagagcgcgaatatcgcctgtgctctccaaagtaccaagccaatgatatactgaatggacgtcctgtctcgacccaattgctctactccatggacgcgcggtacagaaacatcgcgagttactacgtatatcccaacgatgcagcagacatcaagattcatccattcttccgaggtatccgatggcaagatctccacatgtgtcaaccaccaatgatccctagggtcaggaactgggaggacactagatattttgacgactggaagttggccagcaatggtgtcgaggaagctgttaatagtgactcggaggatccagaccaagaacctcacgcgattactcccgaaaatcaagaaataagaccagcagaggacgctatcgagccgccagctgctaaaactaccccaggtgtagcaaaggaggcaaaagacaccgagaagaaaaaggagaagaaacggccccgcgataaaatcctccgagacaaacagataagcaagacggtcttggacattcggaaaaagggcgcttttctggggtacacataccgacgaccgaacgatgttgcgttggccttcagcacagagcgagggcgtcaaccgtatgccagaggccaattggccgacctgtatgcatcatgactatacaaggcaaatacgtggaattgggagttgaggaccaaacatgtcggccattgcattcccattcacacgacccaccaccgtccttttacagggccgaacatatccatataaccttcttttcatcttgtatagcgcctcattccctcataggtgcctgttcggaattacaggacttcactctccctcttatgtatccttaggaataaatatataattacggaaagatgttagcctactacacactagaagtattgtcatcagagtacattctatttcctatgatacttcatggtagataaatgaagtaaaacacccaaaagaaaaagaaaaaacgctgggaaattcgtacacacagcaaggagaaagcggctatgtacggtctcaaatcacatctggtggatagaaaaccggggtatcggagagtaagttcgggacagagaggctttcaaggggtatcaagttcagagtagatggaaatgaagaggggaaatgagtaaggaaatagacgcagaagaggaaaagccaaaacgaaccgagtttacagaaccggcgcgctcatggagaaagccgaatccgtgacacgatcctcgggcttcatagtaccattgagcaatggacagagtttcttgtttgttttgatgtgcccgacctggccgcagttggcacacttgcgctgagtaccagcaggcttgccgtccgggtcaccggaacgagggatgcccttttgcttctcgcgggcgaaacgacgctccttgttgcggttgagacggccgagctcggcctcgatcaacttccggttacgggcgtcgagttctgtatcgcccgtgggttcgagagattccagctttatgtgcatggcttcgtgttggtgacggtattggatatagtgcctgatcactcgaggatcgaaaacatgttgttcctgatgaagaatttcgccgttttcctgtctgatctggcgggtgatacgcagcactttgccgcgctggctgttgaaactcagtttgctgaactgacttgttgtctcatcgtcgcgacgatatggtccaggtgtctgcgcttcggatcgaggtgttggtttgttgaattgatcctggtattcgtcttcttgatccacgtcgctttcctggtcggaatgctcgatggtggaggacagactgcttttttgagcatcccaaatccgacgaatggatgtttcgtatgatttttgctggcgggcaacattgtagctgtgacctccaagctccttaagtcgctgcgcgtccagcttatcctcaacactttcaccgatagccttgaaaccacccttcatgcttgttttgatgaagttataaccctcaccacggccagtaggatctccttcgccatgaagtttcagcatcgccttgccttgagaggccaataaaaagttgcgagttgccttccacggagccatctgctgctcgaagctctcgaattcttcatcttcttcgttatcgccgccggtctcggcatcgttgccataaccagtgtcgtggagatgttgctgtccaatctgcatggattccagaagacaaacatcttcgggctggacccatgagcggattgtgtcttggtcggggagaattggatccagtggtttccaatacttagtgtccttgtcgtgttgaaggaaatccttgaccttctgtcggttctgcatatccgtggtgtttggtatgtgagctgtaacatcgctgattgcaagtcgctcatccgggctcttcttcaacaaacgatataccagcatcttcatgcgattcttggcgacagttgtcaccttgcgcgaatgcggtccaggaatgtctacagatgggaattgctgtccggcaacgtagaaattttcgatgttacgcaggtaatagctagagccatcgaatccagtggtactgcggaccacgaggaagtccgtagatttggtctggtgcgggaatagcggtgctcggtacatggagtttgaaattgccggggaaatttcgccggggtcgacatggccaaagattgagtaggggctcttgtcttgaggtaagagaacaaccgtttccccgatatctgcccttgggcgagtgggatcatcaatattctttcgccggtaataattgatgaaacggttgcacattccaaagttggctagtgtcatgggcagctcctcggagtactccactagcaagacattggagttgtctgacatggacaatgcctttgtggaattatagatagttttcgcatctttgccacgtaagtgcttgcgtcgcacctgggtagggttcttgacccaagacgtttgcccaggtcggaaggccaaagcaggtcggtggaaagatctagcttcagccttggccaactcagtcttgtagtagggccactgcaaacgcagggctggcagaccgtgctcaagtgtcacattgccaagagtactgcggatcttgttctgatgattctgtttgagcatgtcgtatgcttgatcattcgaaatgttgtagcgctgggtgagacggcgcgtcagattcaggtctacttcatccctggtgcgaggagctgcgtgtttcggcttgtttgcgacggcatccgctcttaattcgtccacaagaatgttcggatcattgagatcaattgtcactcgctttgcgattttcattgtcgcttgttctgggtcatccaatagtggaatatcgatatgtgatagagcaatgacatccatcggcgtcgggccggtctttcgtttcttgttcggaacctcggtttccatcagccaatccgcttcatcctcatcaaatgtatcatcttttctttgtgccaatggctgctcttccgggtcaatgctggagacgtcatccttaacatcccagtccacacaaatcgttcgaaggtcctgcatggtgaagccacccggaagtacctcatctccatccagatcatccaggtcaatgtcttccttcgtatcctcatccccctctgctccctcctcttcacggtccgattgtgtaatcatcaccaagccatgagtttcatgatcgaggccacgcttgaggagttgcccggttctgaatgcacgctcatgatcagccgccagctcaatattcactttggtgggcaagacgggcttaggaggcttggccggctgttttccaatgaagatagccttcttgtggggaatcaactcgagccaacgtggaagagtgttccggtcgaacgagggaaacaaggaatgcaaaagctcttcgtggttctcgggtggtgcaggtgggttttcaacccctgacatggcgaacaactgctgctgtagtttccatgcgcggagttcgacgggattcatgtcttccgacatgatactgtcatcatccgggaattcatcttcctccatgataggtggctccggctgcaattccggggccgacgggatgggtggtagttcaacgggcgcatctgtcaagggcatatcttcgtcttcgaagaggccgcgggtaggatcatcctgtccagcaggaggcggcgaaaaagaaccttcgccaaagagatcatcgagattgtcatcctgggtctgagccccctctcccgggtcgccgaagagatcgtcgccgtttccgaaaagagcagcatcgtctgagcccaagttcgcgaaaggatcttgattatcatccactgcaggcagggctggagctgggcgtgtcgtctcttcttcctccggaagttcatcgtcgtcgaagtcctcgtagtcgattgcatcttcggctttttcaccaacttccagatcacgcgacaagaaatctagagaggggccagtatcttcgtagttgttcagttgtcgcatcacatcgtcgaaatcggtatcatcctcgcccccgggggcctttggtgttgcgtgaggcatgatgggcgagtaggcgtgtgtttaagatgagagaagtgttgtaaatgaaaaaagcgttagattcggcaaggttggtgagagaaatcgtaggttaagaatgtaggcgcgagccggacaaggcgacaacgcgatttaaaatatgcacatctgggtattatgcgagtctgcagtttggatgtcggtgttgccgtggctcagactgcgcaggagagagaagaggaggggcgtgtcggacaggtggtcgtagagggaaaacggcgggtttccaggatactgcgcaagggaccgggtcacgctaacccgataaggcaatcagctcgatgcctgaagtccaatacttgagggctcaatagcatcttttcaacgacaatgaagaacaataggaataaaaattttaatcggagttagaaatacatttgaatttattgtcatgaatagcaaccataagtcatgtcacattgaaatccccatagaaaatacacaacgccttgcttgcaccctccatgcaatagtgcattactgtagccttgttaccgtcaggaaccagttttgcaatttgtgccagatcagaggtccttggaatgtaaaggaccatgtgcttgctgaatgctgagtattcatcatacaatcgttggagggaatatggctccatggttttcaagttgaatacctgatctgaacgatatcccgggcctgctacaatcagttcatgtcgcagaagtaacgattcggtgacacttacctccccagggagggctggcgaagacgagactgtacggcgccagttctttgagttgattcttgagaatctcgaaacaatcgccttcgaaccaagtgatcttgtcctccaccccatagattttcgcattatgctttgcgcacttcagcacagcggggtttttttcgatcgcgtagattcgtttccattttccggtcaaagcaaatgcaatggtgttacctcctgcgccagcgaaggcgtccacgagaatactgcgcccagcaggcgctgattcggcaatctgcgaagctatagtgctaaacaaatattagcagaaattctggcataatcgaaaagagtcacaaacttggcgactggttctggtgtgacaccaaaccaagcatcatcggtcaaccatacgccatcatcgtacttggaaaagatccgatagcgttgcgcccagtagctgataattaggttagcattggtattttttaatgatgatgacacttacttctggatgtcccagggcacttcatgcaagctgctgtagtgatgcacctctggaggcgcgtcttcatctgccatgatacaatgcagcgataaagcgaaatgatccatcgattctcgataactgataatgggtggtgtttgcatggtttgcacctgcctatctggccagctcgcacgaggtaaacacaccggctacagcttccctattcagcctcattcgatcccctctcacactcttaattctagcaaataattatgttcggcgcattaaatcgcttcatcggccggctagatggggagcctggccaacagcctcgcagcggccccagtgacaacgcattcggtttccaggtcctccgcaacaaagaccgggatctgcctttagagccatggtttgactttatagttggtatcaacgggcatacaattgtaagcatatgggatcattcaactcccggcattatagcttcgctcacactgacaaacaggaagatccggacccaaacctctttgcgacagaatgccgaaattgcgctgggggaagcttgacacttgaagtgtggagtgcgaaggtagggatactaagatgatacttctagattccagctgaatttatatcctaccagggtcaacgaacacacacaatcactcatcctataccgccaacgaacccctcgctcggcctcgcgctacagcttgcccctctctcttccacgcaaaacatctggcatgttattgcaatcccatcgcctctcagtcccgcataccgagccggattgcttccttactcagactatattattggcactcccagcgggacgttaagaggggagtctgcactcggggagttggttgaagaccatttaaaccgcacgctggttctgtgggtttacaacagcgaatttgatgttgttcgtgaggtcgagctcgttcctaccaggggctggggtggcgaaggcgcccttggtgcagagttgggatacggtgctcttcaccgactacccattgggctcggagaagcagttgagggaccgggagaggttgtattcgagacacgcgaggacgccactacttctccagatacatcagctccttcgggtaacttcatagtcccagcaaacatggcagcgccgccgcctctagccttcgctcaagcaagagttgcgtcgccattacagagcagatcgcccgccgggcgtcgtgcagggaaatcacggtccatggcatcgcccaatagagcctttgatgattactttgctgagggtgaagagaaaagtcgggagcaagactatgcgccgtcacggcatggaactcctctacctccgccgccgaaggcaggagtctcaccctctcactcggggagccctgcgccggaaggaggaccaggacctacagaggaagaatgaatgatggcttaagaatccgaaaccaatttaatatggagtatgatgaaatcaaattatgtcgatcgtcgtgaatgcaaatgggttttgcaacattctatatcttaacaggtcagcgagtttgtactttaactttcctataacagatctagccatgatcaatctaagaagcgagtgaagcagaggttcataggtaagctagccgacttagttgaagctgaaatctcaataaccaagggatgcatggtattgatatgcttcttatttggcctggatattgccaacccacaaacacaacactagagaccatcggcggagtactaacgatgtctggagaatgacaacgaccacgcaagataactagactgtattgaccttggacgagccgctctcaacttcaatcttgcagaaccatggatgggataagatttcgacaggtgaaggtcttttcgcgggatcatattgcaaaatccatcgaaggagcgccttcacttcgtgagcttcctcctcatcaagatccgggcatgcccgatcgaatgactcttctatggatggctcctctaaaataagcggttcctttcccggacggacccctccaagctcctcattgaagagcttcctctcaggcgtgaagtagagcgacgatcttgtctaacggctaaagagctcgtctgggagatcgccgagtagtgatgtgatatagtgagttcctttaactagagcgactttagcgatgtggtgtaagattcttagctcggttgtcgatcccgagatttgagacataaggatctttagggcgatatatctactatttcttagaggggatgagtaacgataatctatagtatcgggggtaaagatacacagaatgaacttacttcatgttataggcgagctaaaccgttgagtaggagccctcgctcagcttccggatgaccttgtactgttggttgaagacgtcgccaagaacgactggatgataactacctgggtggtaatcctccacccactcatagggtgatgtaatatctttgaatctccgttcgtcatctattgggccacttgatggcggagtgggaggagaagaggtactcatggctgcgatgtagaatggagaagaccaaactcgagagaaactgagaagacgttcccaaagagcgttggccaaagcctccgtggtacgtttatgctcgtctacatgaacgagtttcggaacttatgaccacacaattcaaacaaaggaatcaatccggttatgtcttcggatctaggagtttctaagcgtacatatgcaacaaataaatccatctatagccccaaacagtcgggctatatttagtggcccttgctcaccagctcttccaacttcttgcgggtgttaccaatcttttcctccatcatctggcgcgccattccgctgtgcgcaattccggtgtaccagatgtgctccgcgcgctcacgagcagccaagtgcttgtccgcaagcgcagggaccttcttctcgtactcccaaaccaaatctccgacattccgcatggtcacgggcaggaggctgtaggcggcagcagtaccgaaagcgagcggcgacgcagtgcgcaggaagatgccacggttacgcgagacgattgagccggccatggcggccacgacgacgtagacaccgccgggcaaaagacgctcgccggactcggcagaaggcgcgagcgaggcaacggtgttggtgaagtagttttcgatgttgagggcccgagacaggaagttgttgaagccctgctctgcggcgagagagtgtgagtagaggaaaaggcgagcttgtcggacctgagcggtcaggatgtctgtcggggtgggcgaagagggagcttgttgcgcagccggcgcagagatcgacttcggggtagcaggcgcagcaggctgcggaagcttggaggtttcaggaatgtcggcgggcaagtcatcgtagatgggtttccgctatattaggaaagcagtcgtgtgtcagaccaagccttttcagacattcaatagagctaggaacagatctggtcatacatagtctcggggctcttctgcgaaagcggtattcttaggatacagagccatacctcccgcgaggagagtggctgcgatcggagccacagcccgctgggaacaagtcagcataggaacggcacattggggatcaattgaatccaacttgaaagaaggcagttatacaagggcatacctgttgcaacatcggccggaatgacatcctgagggtgtggggaagaggagaaggggggcgagctggtagtgaggatgaagcaaagtcgtgttggagcaggacgggaattcttcggctcggcggaacctccagaaaactccgtcattgtccgttctccttgactctagatttctttcggcaggggatttgtgaatctgcaatttccgatggttttcatctgcttttaatacagtctctacaatgcttcgccctttgcgacgaacatggacatgtcgcaaatgcctactgcggccccaatatcgagccttcgagagcgccgcatcttccccgtcaacgtcgttcgagtatattccagtggataacagttcaccaagaaagaagaccgacgaccatactctacgtcgagtttttgattcccaaccgttttggaatgaattctcccagcagcgcacgacctccgtcccaaagcgagctggattggtccaaaatcaatacctgacaagtcccgagggctttaggacattcgctaatgtctcgctacaaagatgccaggctattgtagccaaggtgcttgcggcctcgacggttgaagaatacagggcccttgcacgcgaccttgaccagctgagcgatctcctgtgtcgtgtcatcgacttgtccgacttcattcgaaccattcaccccgatccgaggatacaggaagcagccacgcaggcgtgggctcttatgtttgaatatatgaacgttttgaacacaaccacggggcttcatgaccaactcaataaggccttgaacaaccccgacgtgacatcatattggaccgaggcagaacggatcgtggcacagatcctcaacaaggatttctcgaactctgcaattcacatgccgcccaatgtgaggcagcggtttgtaaatctctcaaatgatgtgagccagttgggttccgattttatgaatggggcggagcctgcaagatcccaggtggtctttggtgccaatagcctccaaggcttggatcctatggttgtctccaagctcaagcgatggaataagaaagcgccagttccgactacaggtattgtccctcgactcgttctgcgctcggtacatgatgaagaagttcgcaaagagatgtatatcgcgactcgaacatccagcaagcgccaaattcaaagactggaggaactcttggtgaagagggcagagttggcacaacttacaggctataatagcttcgcgcacatgactctcggcgacaaaatggccaagacgcccgaagcagtatcaaactttttgacttcgcttgtgtcaagcaaccaaggtctagtccgggaagaactatctaagctgcaggccttgaagggagactccgcccttcaaccctgggaccacgcatactacgttcacaagcgcgttttggattattccctagctcgtcgctctcgtcacatgggtgttgtcaacgagttcttttctttggggacagtgatgcaaggtctctctcgactgtttgaccgtttgtatggtgtacgtctagttccccatgaagcatctcccggcgagacttggcatcccgacgtccgtcgattggatgtggtggatgaatcggagaatcacattgcagtcgtctactgcgacctatttacacggccaagcaaacacccgaacccggctcactttactctgcgctgctcgcgcgaaatctctccagaggagatcgccgagtgtgcgtctatgaacgaatctgcgcatccgaacgatggcatggccactggtgtagatccgctgactaacactctgcgccaacttccaaccatcgccctcgtgtgtgatttccaggaacctcaggccaatggcagcggccagccaactctcttgagtgagcagagtgttcgcactttgttccacgagatgggccacgctgtccactccatcctgggccaaacgcctctacagtccatctccggtactcggtgcgccacggacttcgccgaacttccttccgtattgatggagagctttgcgactgcgccagaggtgctgcgcctctacgcgcgacactggaagaccgacgagcctttgtctgagagcatgatgcagagcatggagctagaccgcactgcgcacgggtccatctacggtgccgttgagaatgaagcacagatcctcatggctctcgtcgatcaggcatatcattcgatcccagccgaagtcagctccgctggcattgattccaccgatatctaccatcgagtcttttccgagtattccagtctacccgagccgaacaatattccgcgcacttcttggcagggcttcttcggccacttgtatggttacggtgccacctactatagctatatttttgatcgcgcgatcgcaaacaaactctggcaggacgtcttcctgtctggtcatgcggcaactgaccgtgccgccggtgagcgatacaagaacgaagtcctccgttggggtggtggccgcaatggctggcagtgtgtggccggtgtcctaggagacaagaacccctccaatgccaacggacggttagctgaaggtggcgacgaggccatgcgtgaggttggccgctggggcctcgggcgtgaaggcgtgtccggataatgtgacacgaatgtacttttattgcctttgacacataccttggagggttttgtaaataaacatattttcacgatttgatttgatcttctgaccgcaattaaactagcatgcattggatgtaatgtccgagactagcccacagctaagccgcgccaccagtgttggcgttgtcggcgttgtcggttatggcggggacggtgattggaatgtctcactgtcccccctttgtttggtctatcacgaaacactctcggtactccagggctggattgcaagctccagatgtcgtttattatgcttgagaagtcttccaagtaggcaaaggaactggaaatgataatttttcagtatacgaggcaactggacttcccagacaagccttatcgcacgttttgccctctgacgtctttcacttgcactatgcatggtggcttgtttagcggctgctatgcgatgataacaggtagcgtcgaactggttgtttatattgaggttatctcctaggcagagcacatgctagatctcagggaaatagattaacagacggtctgttcacctgatcctcttaatcttataaaataccaggcctgatcgtctagaccttatcttctttgttctgcaatttgcaataaatacggaggacctacgttcacttcgtggtaattgaccgctgtctctgactcgttgtatcggatattgcggtttcagcctctgtccctgctcaatcaaactgatatttggcgagaaattatttattcccttggccttcgatcttcctctcgcaaatcaccattcattcaagttcagtctacgcattcaaaatgcctgatatccttattgtcaatgacaatgcttcattcgcttctagcgataccttctctacccaagattcgatagagcaaccacggaccccactccgtcgaagaaatacagttgcaacgctcacacgaaaggtttctcagaggataacaaataaaatcctcaggggcggcgtccaagaacatgcactcagcgaaaaaaatctcaaatatctcaatgacgcgacagatgttgacccaccagatcatgcgatccacgaggtccaaatatacgaccggatttacgaagccattgaagaggaatgccctgttttcgacgtagaagcagcgagggagatgcgtctgcatcagtcatactctgccttctgtcaaaacttcacgctatcggggacaacacggacgaccaggaaattcgacttgtcaatgggaccagagtgggccggggaacatccggagtttccccttgacgaaaccctcgaaaccaatgacacgcttcaattcccgggttctcattcctatcccgaacacataacggtgcatccaaagccccgagcaagcacagtcgaattcccaatatcacacccatccacagatctcgacgcatcacacccagtgacgactgtcgagaggtcaccttcggaatggcccgtcacagacacgccaaatatcgaggaagacttcgaccggatcagttcaagctttgagataacgcccaactccaactccaactacctccaaccaccgcctcatatcatcaccccaactgtctggatggacatgcagcgcatcgagcgggaacgaaaggcagctcgacggcagagactcctcaatccgttccggtcgtggtttatggcaagccaacccctcgtgggggcggaacgatgaagtcgtcgactaacgggttcgactaacgggttcgactaacgggttcgactaacgggttcgactaacgggttcgaataacgggttctgctgtcagacaaagcacggctgggctgagacatcggtttggtttcaaatttgctggttggattttcaatggatttccatcttaattaaacaatcatatttgctttttgctttgaatcatatttatcacggtgcatagcgacctcgggatcactagggactttggttctattggcttctatttcaagcagaaatttgccatttccaaattattatagcgtagcatcattgactatgttctcgattttaggtattaccaagattcgcccataagctgacgctaccccagccccgcggttcggctttcgcctcggaacgtgccatcggaacgtgtctgaactgggggatctacagaaactgggggaactgattccgcacacttcaattccaggctcagagtcgtcttcttaaataaacccagaaatggccttcttctttgtttgcttcgacttttctactcagtatctcgcttctgttgtatcacacaagttcaaaatataaccacatcatggctatccaccgcataataaccgatccagctgcccttctaattgtcggaacccttctcttccttgtctacctgatatatcaacgattcttgcatccgttggcaaaataccccgggccgtttcttgctgccttcacggacttcaacaagttctcgctgttcttgtctctgcgcattgaccaaagaatcttttctttgcatcaaaaatacggacctattgtgcgaatagctccaaacgagctcagcttctggaatcccgaggccgtcgccccaatctacaagtccggaaaggcaatggtcaaaagtccatttttcgatggattcaaaacattcaatccaagtctgtttgggaaccgagatgaaaaagtaagattcagacaaaacaaatgtgttctccgcaatgttctcacaaagaaaccaggttcacgccctgagacggcgacagatggcccatagtttctcgacgagctctttgactgatatggagtcgatttttgatcgacatgtcgaaaacttgcgtcggaagctagacaaatacgcggtatcgggagaccagtttgatctcaaggatctcattgccttttatggctatgatgtaattggggaactggccttcaatctcgatttccactcgcaggaaaaggacgaccccgagaatcttccccctataaatgaccatatccttctcggatgcttgtatggctctcttcccgggatcctgccttggtcaatgaatttgagcaagtatctgccgttttcatggctccgcaagttgctcgggagccggcaaaagattcgcagcacggtggcacaatgcgtggaggacaagacgagtgaatcttctggaaaaacacttctcacaaacctccagaaggcaaaagacccagaaacgggcgaggaattgtcaaatatcgaaatcaactccgaagcgtttggattccttgttgctggttcgcacactacatcagggaccttgactttattttttcaccatcttcttcacaaccccgacgttcggcgccggttggaggaggagatttgtcaaaagctgccgatcattgagcacggcgcctatccgtttcctgggctggagaaaatgttgccgtttatgacggcatgtatccgtgagaatttccgtcactcgccagtctttactatgccattgacacggactgtgatggatcatgcggggatgattatcgatggagaacggatccctcggggagtgagtgattttactattgatgtggaagactttgctaatttgtgtcaggtcaatgtgtccatctcgaactactcattgcaccacaatccgtccatttggggacctgaccatgacgaattcaaccctgatcgttggttggcttccgacggcacggcacaggataaattacagtatctaatgcatttcggagtgggtcataggatgtgcattggacgcaacattgcgacaataagtattgtcaagattatcacgactctatttcgatcctatgattttgacgtgatggataaggatgagcgccttgatgtcatgactgttggcattggtgagaaggaaggtccattgtggtgtcgtgtgagctggagagagtaacatgccaaggatgtgtgatcttcaaatgctcttggtgatggagcgtgttgtagtatcatatagcaatgttgcaaaaagtgaattttccgtctcatttttctggggcataagttcaaggcctaacatattcggttcattgaggctttttaatcagatagtagactaagcctgagttatgaattgccatagtttgaaagctcactacataaaatagatgctaaacttgccactaaaacgaaaatacaaacctccaatcccttcctaagctggggttgtaaactaatcggagccctttgaccatatggcttttccgagcgacaatgataggtttctactatatgtagtagttccatgagtgatacagagtagtattcaagttttaattcaaggcaaagctgaaacgaaagacggaaagtgcacacggaacttgacaatgcgtaacgggaagtgacgaacagtgcgggacagaaacgccgtcaataagccgacagcatatgtatcctataaactcttcatattggaaatacctagaagtaccagatccatttgaacaagaactttttcacacccattatgtctgccgaaattgacgtgcccagcaccgtaagtctagaattcgcatcaaattaaaccagacattgaagccaacatttctagctggatgcacaagctatacgtgttatcatcgttggagcaggactgggagggctggcctgtgccattgcgtgtcgtcgaggtgaacacccgctcgatgtaaccattctcgaacgatctgaagagctcttgcccgtcggcgcagggattcaattaccaccaaatgcaacaagagttatggcccatttcggccttatagaaaagctgaaaagggccggcgctatcactacggaggggtatacgctgagaagatatcgggatggacatacagttgctcaaaagccgttgtagtgacttatggtgctgaatagatgtctgtgccaagtaatcgagttagcttgcttgggatatgctaacgatattcggaaagggtcatacatagggctgactaccaagccttgcttcttgaagaagcaactaacgcaggtgcacatctagtcaaaaatgccgaagtggtcagcatcgagtcgtgtccagccgttgacatggttgtgctaaaggacggcagacgtttccatcccgacatgattattggtgcagacggtaagcatttcttggttcgaaagtgtccataaatcacagttggctaacactggcatcaggactttggtctacaatgcgggagttcattatggatgggccatctccacctctggaaacaggtgatttggcgtatcgtggcatgttttcgctccaagagctcactgtgttaaacgacccagatgtcgagaagcttgttgcagcatctgatgttcaggtctggatggggccggagaaacatgttgcgttttaccccatcagaaataaaacagaattcaatttggtattactgcaagtcacttcaccgcagataatgccaaagccctcagttgacagagtccagttgtccagatgacctacccaaaggatcacgaacgtcagagggcgatttgaaagagatgcgaagtcattttgacggatgggacccggcgtatgattaatacaagcccattgcacgatatgaactaatgcattgacagacttcggaccatgatctcttgtctccgcagagctttgaagtggaagctctgccaccacgaggagctccagagatggacaaaggcgagttattgatcgaatagtattatgttccttgaatctagtctgaccgtgaatagggtactgtgaccttgttaggcgacgcctgtcatcccactttgccataccaagcgcaaggggcggcaatggcagtcgaggatggtgctgtcttaggacagctcttgacgacggcacaaagtcgggcacttccaaattctgcgacggaatttcgtgcgatgattactgacattttaagtctctatgaaaggctgcggaaggagcgaaccgaaacaaacgtccttggggccgtacagagtcgtgatttctatcgcctttgcgatggaagcgagcaaatggaacgcgatcagatcttatccagactccctgattcacaatggacgggggattgcaaatggaactggggagatgctaaatatcaacagagccttcttgggttcgatgtattgggcgacgccgcacgcgagttcaatggcctcgggttttagggctcgggaagaagtgagaagacctttttggggttgatactcgcaccccacttacctgttatgctatgttccactagaatgtaacaatcaaagcctacaaatacacgtttacgccgatcaaaagctatttataacaagtccaaagtacattctgctgcggaaacagtccgcctcttacgtaatatatctcgtgtcgatccacggctggacatatatatattctgccgggatgccttcagagctccgaccatacttacatcatcgtaatcatcccatctcaatgtgaattccagagttgttgtgagatcatgaataatgccacatccaagcggcgttctcgactcaaacccgactgtgagcgaaaacgaccaaagtatgtcttcaaagcgtgtgcatcatgcaaacgcagaaaagttcgctgtaacggcaaaactccttgcgagttctgtgagcgacgttcgatcaagtgttgctattcaaatgagtttgaatcatccacggatcatgcccaccatttgaatgatcgggagttaccgttggaggaaaagaacgttggccgatcggatattgtgtaagagctgtatgattcacatggcgatcgatcgctaattgcgcttcaaggccattgcagcagctgtctcaccttgtggcaactttgcaggataaggtcgagttattacatcacgaaatccaagatgttccgaaagagcgtttgtctagcgtcaagggtgatactgatactcagaaccacccgaagctgaaagatcttcgatctacctcaccatcactgcctgattatactggcccaaccagttctctcttcagcctcggcgttgcgaagatgattctagagcatggcaggccttccagcccagagaagctagatccggagatcgctggatcggtgataacgacaaacgagcaagacatgacgcaaatggaggcttgttcatcaactaaaacgggtagtagtgacctgggcctgctgagtgagattaacttgaacgaagctttccgcctcattcatctgtatgatgatatcgtaggcacgttgcttccgatagttgatatcgaaacaatcaaaatgcaagctgaaatgctgtgggcgaacatcatttacgaactgaatccgaatgatagttctggtggcctccgtgaatgcgatgccacccctttgaaaatggttatcgctattgctctgcttgctgagggtggtggctatagccgcgtggcgattgatctgcacgacagcctgctaccaaatgtattgccccatgccgtcttgagaaaattctccttacggggccagcagataatcctactgaatgtacgtgccgctacgcagtatcatattcgactctaatcgaacttgacaacaggccttgttttatatgttccaggatgactacagactcgcgtctcgaatgattactattggctcgcgcactattattgagtccggattacatcggaaaaaagttctttcgcattatttcccacgtccagaggagcagaaggaaatcaccaccctgctctacacttctttcgttctcgatcggcaaatcaacttcgcagctgggttgccgttcactttccgcgacaacgatatcgacattcctgaggtggttcgttttttctaatagctcgatgttaaatgaaaagggtcagcagactaataatagggactacaggaagacgttccatatctgaaagccatgagatcatatgtgcagtttggagcccaaatttggtattccatcacagatgaacacgggaaattcaagcgacggttgaaggaagaaacctttgactttttgagctacaaagtcaaatcatggcaagaaagtctccccaaagctctacagtcgtcccaagacgagctgggatctgtggagagcattcctttcgaggaccgaaaggcctatctcatcagatctatcctgttcctacgagcgaaccagatcaggattttggtcctacgtcctctactttactcataccaaacagcgaaagcgaatcccggccatgcagacacccttgtccaacttgcaacaaacacgatcaataaggttctcgagatggatcgtcaatccaatctatatcgcacacaaataccaattttgaatcatttcctttcatctgcgttgtgttccttgttccttgttcttgctcattattcgcgcctttccaccacggagttcactacgagtgaaagtgccgccgtggtcgatgctattgccaatggcctaagcttactgcgaacttacctattctccctgtcttcacagcggttgctgcgaaagtttactgggccacagggcctgatatctcatcttgggcttctgaaaaactgcaatcactttgacaaattactcttggagaagcttgatattgacaaatttacgggtctagacaatgtcgcgctagatcgaaatccagtgatggagggtaatgatcatcctctgcatgattactccaatccgacaggaagtgagtggcctcttgaattatcattgccatccccagtcacgcccggagatataagccagctatttgctagctatgaattggacttcatgggattcaatctcttatgatcaatgcaacttgtgttttgtgactgtttccaagcagcttgcgcttgatactcttgtttttccgcaacactaaaaatcgacttccctctgaatcacaaaaattctaactcaggtgctgagttatgtttctatgtccgtaaatatacttttagacaaaaaacaaaaaaaaatggactcgcggggaatcgaaccccggaccactcccatgctaagggagtattataccactaaaccacaagcccagttcgatggaagaggccagcatttaatgctatatgaagtgaacttaatctacagcatgtctacggaagggttacgatgttccatactccctaagcatcaatgatatacagtaacatgtgtgtccggtagactaaatcccaagtccaatcattacatggcacctatggatcgtaaacaatcaatgtgatgcaaggaaaagctgatgaacatgctgtaggtatgtaaaaatcataacctgttacttcttactatgtatatatgcaccggttgatccgaaggcaaaatgacaatgtgtaaaatgtgtatgtacatgggacagaggaaggagcagcttcacaaacaaactctcgtaaaagaccagacatggtttaattccctgtcgcacggagtgaatatcactcaaagggggtatggagaaatagaagaattgcataggaaagaaaaagtagtggaaccagccgaatcgctaaaactgacagatgaagcatgggtcgaagcacataccgaaaaacaaggggaaaaggcccgttgtatgcaaataaaaattgatatggcgattctactcatgcgctgcttccaaatcggttcgtaagccaaccggcgagtcccccaacaccctcaccccggctagaccgacggtttctggattcccctccctctggtgtaggggacccgggtggtgacattcgagtggaaagccgactctgcaatgaagaagataatgaggatcgaccgctgcgcacagtgcgagcagaactgcgacgcggttgggatctcggctgctcaggactatcccggatcactaccggattctcaggggtgccttctccgcctctgtgagatataccgtcaactgagagtcgtcgttcatggatacgactcacatacttacgttgtatttgaattgatgctgcgccggcaatgcggacaagtgtcatgctgggtcagccatgcatggatgcagttgtaatgaaaccagtgagcgcatggtaacacagtgacttccaagccgagttcaacgttatccatgcaaatcgaacacactgcttttccttcagatcccatcatctcttcagtgatcttcttcttcggcaaagcttggacggcagcatcagatgctggcggtgccgcagtgctagtccctccaggattatcaaccagttgtgtgatgactcggtcgagctcctcctgcgaatagactgcatccccgcttcgactcatgttgagaagggcagacaatatcgaaagagcatgtgggcttgccgggttacgacctccacgtgagcgtcgtgtagtttgtactccaatgtcagcacgaatggcgtccatgattctagatttgattagtctggtgataatgcaacatagtagccaagtacatactcatttatgtctgtcgggttgcggttgacaggttgaggcgcatctgcattgcggggagagaggcctgggtgatggccagtaaggtggtcgtcctcgagccagtcgggagcggtagaggattgaggatggaaggggtcctctccaaagcctctgtaaccacgggcatttggctccattaaattttgaaaaattgtgtcaaagccgtgcatcatcatcggaaccacagggttcgggccattgttgcgctgaccagaaggccttccggtctcaagtgtcgcgctgctgaatgagaagcgaccgtccggcgatctgtatgtgcgcaaggaggaaaatggaggagtagcccttccgaaaaacccggggccttgctgttcttgcgtgtcgtgttcccacggattgtggtctaaccatgggctaacgcgcgaaggcgatacggagtccgcacggcgtgagggggagccttcgggagatatttctggggggatttcaatctagaggaagcgaaagtgtcagaattaaataaaccaagagagaaagtattcgctgtactatttctgtgaactccgattgacaatgtgggcacgtcaaaaaatcaccatccttagtccaaaccccgccacaggcatggcataacatgcggtcgccagtgtccatgtcgcaatacagactgataatcacctagagattatgagatgttgtacaacgtagatgttatgattgaagctgatagaatcgataagcgccagaacagtcacgagtgccttatctgcggggagctggtcacagtcggttagatggccatatttatcggatgaggaagaacagaaagaacagaaagaacaggaagaacaggaagagacggggggttaatatttcacagatggtggtgagccaacgtgcaaggacaaaggatgattagagtgattaatcgagtgagcctccaaccggcggctggaaggaggcaatgacgttgatcagcaaatcgccgccatagcctgaacaaggcaaagggaaccgtcaaccatggacttgtatgaaacaaagaacactctaggtttcatacaaaattagaaaaccatgtgtttggcagccttgtctcctattgttgctcttgtttcaacgcctggtttcatatcggggaatctgtcgcgacgcaagggccaggaggcgaggtatacagctcatattactcaaaaagttaagcctccttttacaccggagagattaagactcaatcatatgatcaattcgtaaagaaactagtacaaagtgtataataaacagcaaaaaatggtcactttttccatgcagggatacaaattcctcgcgatcatctcatccctgccaaatgcactaggagagtgaactgaaaaaagagacagcaatggatatcacagatgcaattcaatcggtaacctcaaaacaccccgaaaacggatgacaacgtcgagcactttacttgatctcgaggagcttaacgtcgaagataagcttggagttggcgggaatgccggggagggccttcttgccgtatgcaagagaaggagggatggagatacgacgctcaccaccgacagccatgccggcgacaccgatgtcccaacccttgatgacctcgccctttccgagcttgaaggtgaaaggcttgcccttcttgttggagtcgaagaccttgccgtcctcgagcttgccgatgtagcgcatagcgacagtgttgccactcttggcagcaacaccctttccgagcttcttgtcgtccatcttgactccacggatctccttaacgccgagagtgccggtgggcttgtcgccggagggggtagggccctgctcgaggttcttggcgaactggaccttcttgtcggtcttggcctccttcttggcatccttcttgggctcaacagcggcggcatcgccgttgttcttcttgagcttcttctgctgggccttggtcaaggcgggctcctcagccttggtagacttggccttgttggccttagccatcagatcgtcgaggctgacctcatcctcagcagcgcgcttgttcttgcccttcttggactcaacaagcttaggagcctcgtcctcgctctcaacctcggtgattctagggtcctcaatgtcatcaaggtcatcgctctcatcaccatcctgcatggccaagagatcttccatgtcaagctcatcctcatcgggagacagatcgtagtcatcctcctcctcatcgtggtcatggtcatggttgtgttcatcaagaccaatgacgtagttaccggttaggaagacagtgtggttaccggtgaccttgaagaacacgggctcaccctcgcagacagtgatgcccaggggctgttggtagttctacagaggtattaaacgtcaatattcaaccgattgtgaaactcaagagggtgttcgccttacctggctggggctgagggtgcagataacgctctcatcgagctccaggccctcctcagactcagagtcctcatcgtcaagggcaggacccttacccttgatgagcttggagatggcagcctttaggtcgaagtcctcctcatcgtcctcagactcagagtcctcatcgtcaagggcaggacccttacccttgatgagcttggagatggcagcctttaggtcgaagtcctcctcatcgtcctcctcctcatcatcttcctccatggcgtcctcgaggtccttgagggcggcagctgccttgagcttgcgggccttctccttgtcgctaggaccaccgttggactcctcctcgtcatcggagtcctcttcatcctcatcactgtagtcctcatcatcctcgtcatcctcatcgagaagaccaggaggaccgcgaacaatcttcaaagtggaacgggaaggcttgctcgagtcctggtcatcctcgtactctggggcctcatcggggtcgatagcggccatgctgatgcggaactatatttaatgtcagcacaagctgttagccaattgatgattacagtaagactgaccgaagcagcagcgttggggactgcttggaccatcgcaccgggaggaacccggagcgcatagactgcgacaggctgaacagcagacattgtgagtaaaataaagtgacgaaggtgaagaagatcaagttcaaaaatagaatgaaccacgtggaaaaggatgtggatggaaaggaaagaaaagagaaaagaaaagatgctcccaagcaacagatacggcaaaaaaattggagaaaaaaatattgatcaatgagatcaactaaccgttcaccgctggtgtattgccgtgagtgaccgcttccttgaagcttggatccacgtgatggttgccaagcttcgcgcgaaagggcaacatccttttctttacactctcttcttagtcatgatggtagttgtagcccaaaatgggctcccgtcatgagatcaactctagtgcagtgcgcaaacgcattgaaaatcgtacgtttagtctaaatatcaatttccacttttatctgaccatgtctagatgaatttgacgatgaaagaggagaggagtatgaggcctccagcttcggcgggtttggggactacatgcgccggaaaaagatgaagttgcagaatcttgacgcagaaattcgagcatcagctggtgattgcccgccaatattccgtggtgtggttgcccatatcaatgggtacactcaaccttccctgcaagagctgcaccgtttgattgtcagccatgggggtggcttccttcaatatctggatggcaagacagcagctactcatatcattgccactgctctgacccccaagaagcgtgaagagttccgccgctaccgcatagtgaaacctacgtgggtgacagacagtatcaaagcaggacgtctgctgccatgggatgaatttagaatagtagacgagggtgaagcgcaaagagtgctcaagtttgataatggccggtttatcagccagacgaatagccctcgcgcacgttacaatgaccaatcgagggctagcaggtatagctttcagctcagagatatgagcacaacagaagaagggatcggctcttcatcgaagtccgtgacttcatctattcggtcgaaagcctcacatatgatcacaccaaccatgccgagccagccatctcagtcggactatggcgacttccctagcttcactatggagaacgaggaggaatatcatgaccctgagcacgaacaagctctaaccagtgatatagcacaatctataataccacatcaaactcccaattcagatcaagtgcccacttcaccagatccactggttgacctcgaatcaacaacctcgcctctcgaccaaacaagtccaacaaaacccgctttaacttctgaagaatacaatgcgcagctcctgtccgacccaaggatgcagaagtcatctgttgtcaatccagaattcctgcagcagtattatagggagtctcgcctgcatcatctgtcaacctggaaggcggagctgaaagcccaactgcaggccgcaacgcaggaaaatgcacagtctcagagattgaaaaagaaacctgtgcctggatcaagacggtacattctacacgtggacttcgactcattctttgcagctgtctcagttctaaatcatcccgagctccggggaaagcctgttgctatcgcccatggctctggatcaggctccgagattgctagttgtaattatcctgcacgtgctcgcggcgtcaagaatgggatgtggatgaaagctgctttgcaatcatgccccgatctcaaagtcctaccttatgatttccctgcctatgaagaggcgagtcgcaagttctacacctcgatacttgccatcgatggtatcgtgcaaagtgtcagtatcgacgaggctttgatcgatgtcacaaatttatgcgtggaagcaggcggctcagacggaaaggctatatcagaaggatcaacctatcgcgagcaagccaaagcggatgaaattgcgcaaaatttacgcgattcaatcagagagaagaccggatgtgaagtctctgtcggaattggcaacaatattcttctcgcaaaagtgtctcttagaaaagccaagcctgctggacagttccaattaaagccagatgctgttttggacttcattggagatctcactgttcgtgatcttcccggagtgggtaatagcatggcaattaaactggaagaactgaacgtgaagtttgtcaaagacatccgagatctcccgagagagagactaatatctggtctgggacccaaaactggaatgaaattgtgggaatacgcccgaggaatcgacagaacagaagttggcgatcaaaccacgaggaaatctgtttcggccgaggtcaactgggggattcgatttgtcaatcaggaccaagcagaggactttgtgcgttctctgtgcgaggagctgaatcggagattgacggaaaatctagtgaaggggaaacagctcactttaaaggtcatgcgtcgatcgctagacgctccactagaacccgtcaagcatctcggccatggaaagtgtgatacattcaacaagagcgtcgctcttggtgtcgcgaccaatgttccagaagtcattgggaaagaagcaatatcgatgttgagaagtttcaatttttcacctggagacttgagaggtctgggtgtgcaaatgaccaaacttgaatcaatcaaatctggcccttcaggccccgagagcagccagcgacaactcaacttccagaagtctccgcctcgccagaaagtcattccagatgcggaccctgacgagctagagagtccgcaaaaagataactctgttcgtattcaatcagatccaatactcagcgatagtgcccacaagccactcaatatctcggggacccaatttattatgcccacccaagcggatcccaaagtcgttgccgagttgcctagggatatcagatcaaggcttgttgcacaagcaaagccgcgccaggattctcgctcagggtctccatgtcctcttccccgtgaagcacgacaacctgcccaagcagacctcccccctcagtctcagctggacccagatgcattggcggcattgcctgaagatgtccgccaagaagtattgggttattataaccacccagctatcaacgctgcgtcaccgctcgtgccggtagtaccagagtcgcgcccatcaacatctggttctctcaagtcgagaaggccagtctcaccacccaagaaaagacgtggccgcccgccgaagtcggcaacgattgcgaacaagcctaagcctaagcctctaaaccaatttagctttgggttcgttcttccacgcccagcagctgtatctgctagtctggacgaagaggctttgtctagacaagcgtcaccaaatgtcgaagagccaacccaaccttcggctgaattccttgctgctttacctgaagatatcagacaagagcttcttgaagaacaagaacgcacccgcatgcaacagcgctcgcgagctactgaaaccacacaaagacctccatctagggatcaggaggctcctccttctgcgccaattgccgtagagaaacttctacctttaccacctctccccaagcgtcccgtctttacatcacaacgtctgtcccaattaccagatctacgagatgctgttggctcatggcatgaagtctttgcagctggcggtccgtacagcgaagacgttacttcactatgtacatacctgtccagcgtgacattgcaagagaaagatgtggataaggctgtttcagtggtgcgctggttgatgtggttggtcggtgagcattcgcagcagcaggggcctaaagagccacaggggtctcggcccgagggaactataagctgggaagaggctatagagaccatgcagaatagtgtccaggtggctctggaacaaagagagcttcccccggtggacttttcgtaaatgatacccaaatgtcagacaaaacatcgttgcctgtatatatctaaatgagtgcagaaaggtcaacaatatatgtaagatttgtaatatttgtacaaatacgctatatacagtacacaccaaagccgaaagatgtcacctctccggagaagggagaaaaatcgaagaaaatcgagggttgaagatgatagaagatgaggcagatcaaggtggagtcgtggtagcgtggcatgccccatacgcaggtgtattgccccacatctgtcacctccacctccgacttctaccccgtgtctttgacctttcagacaacaaacccgtcatgccgcctgtcaccgatggtcagttctccttcaatatcgacacattttatgtcaccgcgtcgggaggacagcttcaccgccgtgcagctccagctgagatcaaagccctttacgatactgcgactaccgacaagagcacaccagaccacccaggccattggtatgaagcacagctcctccactatggcctaccaccgtcaaaggtcaaggcgactgctaagatgaggctcttaaaggccgtgcaagacggcgccctgagcgttcccaaggaaagcctccaaatcgaaaagaatctgaagaaggaatggaagaagcaggattcggaggaaccagcaaagaccaacacgaagacgacaacgacgaagactgttaccaccaagactattacggtttctaagacggttgcgtccaaaaccaccgagagcaagactactgcgtccaaagccgcggccaagcctgcagccgtcaaaactgcggctcccaaggctgctacgtccaaagctgctatctccaagaaagatcccgcactcaaggccactgcctccaaagccactgcggccaaagctaccacgaccaaggctgctcctaaagccgcggccaaacctgctgctggcaaaactgcaactgccaagccagctacgcctaaggctgcctccaagaaggctacggcgcccaaggccgctgcccccaaagccacgacaaccaaaagtgctacctctcaatctgccccagccaagagaaagagggcctcgaatgccgaggagacagccgacaaaccacagaccgccaaacgccgcgtgtatggcaaaaagacccaagacaacacaaatatgcccacaaacagctaccccgggccgagtggatggtctgagcagcctgagcagcctgagcatcaggatgcgcctccctcgtacgaaatcgcctgcagaatggtaaatatattctccctcattcacaaacgcaatggatacttacctaacatgtctaattaggacggagaacatccctatgatgctttaggtgaccagatggacattgacggtccgaacgagtttggttatggccattatagcgagtctgaaacatgctcagagccaccatctccacctcgagccctgaaaaacaccctgggtcttctcaatggaacgtatgaagttcgttccccccgtatcgagtgcgagtggccggacgctgttcgcgggggaatcttcttatctcttcgccttaatgggaatgagatttgggggacatacgagctcggggcgtttaagggtgtactgtggatgccacaacgacccatgaggccctcctttgacagaattccgtttaagtggcgtgggcgggagaccggtgagggtgagatgagctttgcagatgaccaggatggttggattgagtttttgggtgatggtgatattgttgggatgatcagctgctatggtgatgtccatttccgagggcagcggattgatagttctgtccgcacagccagtgatctgcggaacgaatggaatcgctacaacgaagaggaatatgaccgagagtgtaggagtcgatggtgaatgatcctgaactgaatgaaggcatggggtccagcgaaaaccagtgctagctaatggatatcttgattaaatgatgcccaagtggtctatttgaccctagttcaaggtagtaagtcaaaatcctccctggatggccgagtgggtgagagacacgaagtcatctgattgctgggtgaaacattgatcacgggtgataccgcattgggaaacccagcaatggggaaactggtcagggtttcgatcctcgccaggagtagttggggcacggatttccttttttgttccttctccatgtcagcccttcactcttccttccacttatctcgtgatacagcggtgaaatagctctttctaacaggatattctgatatcatggaatgatcattgccttttgtttgtgttcaattgggcccgtctcagggaagtcacgatgttctcatgcacttggcactgggggttacaatcaacccactctgtcggtaccaatgtcttttgctatataaattgatgagcattatattcccaccaccgactaatgttttatatacagacccacacccaaatctagaccatttgcgagcctatcagcgaaagaattcgacagtctagcttgcgacagaacacttattccagagcatctacgcccgcagcctttaggcccaggcaccgacgatgctcatgcaaaaagcacccgaaaaaaccaggatgcaggcataaacccttctcttcccacggagaatacgccagctctcatcactgagaaagtcttccgacatcaactccaccagcgaggcaaatatcaaaagtccagctgacatggcattcataacaccgacaacgagcaaaccaacctccgagtcgggattataaagtgtatgggttgcgaggccaatagcttgcccgattggagtcctagtattttgtcagcaccattgggcccagagtgagtggggattaactcacgtgcatccgtacgcaagggacatgatccagggctggagttgcttttctgaccagggaagtgaggcaatgcgggatccaagcgccaggccttcaaatgtttctgtggttgatttagtcaaattcattgccccgatcaagcaggcgaatacagagaactcacgatgaaatacaattgcaatgagcagaatcacaaattcactgccaaccgacacactgagtgacatgccgataaacacgctgtggaaaagaatacccatttcaagaaggtagacctgcatggtctctttcttctgcttctgctccggggttaaggcgaaggtatcgtcgtgacgctccacgtctgtctggatagccccgttatctttctcgtggtgagttggaacatcaggcgcagatgaaactcgaactatatcttcagtcccttcgcccattctattgatcgctcggcttatgctcgcggaccttccaattagcggacccatatctcgcaaatgccggccttccattccaacggagtgcgagcgcggcactatagagtggtcgagatactcaggaacaccgagagttggaattggaggtgtccttgcatccgaagggcagggagctggcctttcggctgggacctggtttcctccacggcagatactctgggctggactgaataccatttcgatgactgtaacgagaaatatgccacccaaggcaatggcacccggcatggctgggtagtcctttgtccagaaattagagagacatgggtcgcccagcgaagtaaatgccgtcggaaggagatgtacaaatgccgtggcgacgaggacacccgttccaaaatgggtgacgaagaaaaggaacgcaggtggaatatgcattcgtggaaagcgagttgcaaggatagggaatgcacatgcaatgcttgaggtggccaggatgatgaagagggctgcaacgtgcaaaggtaggtcgtatgcaccgccgtcacctccctgagcacaacttgatcgtttggctggctctgtaaacggcattgcaacaggtgcttccagtgtgagagcttgctttggcgttaagtaccgtctcagattatcgaaggagatgactgccgagacaagaagcacggagaggagccacaacgcccaatccttgatactctgatatgatgggaaaacattggtatttgaatccaatccattgtgattgatttcgatattagtatttttgggagcgaggcgtcctgttcactggttagaaggttattactcaaaaaaacatgcttgcttttcatacctgacattgtcagggacgcctcgcaccccgcgccaaggtgattgcctgcatccttttcctccagcgtaggaattaccttgcaattggagcttccccgtaaagtacccggaccagactcatcgtctttcttctcgcgggtgtttgagatgccatcgaggtcttggcgggtagtcaggtcgggagaaaggaagcgcgggctctggttccacccatcgtgcagcaaagtgtcgtcagtccgagatgggcagttcatggtgctatttgaatgatttttctaacttcgctatctggattcagtgtaacaggtgaaaattatagccagcactgatcccgagggcttggcatggggtggactccgtcccgacttttcttggcagtcggctatgaaatcattgcggctcaggcaacctccggtattggccgaactacgattaccggagacaatatgtttgcgttgcaaggcctgaaaactccatgacgtgaaaccgaggtcactagaatgtgtcccagaacgataggtctagcgaggttccaagtttgatccaagactactaatcgactggcaggacctctagagaaacagccctggagggtcaatgtagggttgataggtgcctgcaaattgatacaggaactagttattacaggagcacaacagtgcacattgatattcgtgttctttttcttatggtcattttgcccagggagccttggtatgcacattggcacttccatcctgtgaagccgggggcctagactgagcagaaaagggtgctctgacgggtgacatgggacctggaggcatccttgaagtatctggaagagcagagggaactctggtcgtaccactgggaattccctctcttctcatcccagcccacggggctgctgtcgagcccatcgggggaacagcttgcgtgcctgtcccggacttagcccagggagcctgggtgccagctccgggcatagaacgggtagcggcaacagacgggtggccagaatccggcgcaatggggcgtgactgaggaccagatgtggcatgaaccgtggaggggggcacaggcgcatttggatcatggtcccaactgaacagagatccgaaagggaagtgctgtaccacggggaattttgaaagaacttccgcgttgtacatcttgatcattccctggtgcaacatgtcagcgtgaacatccccactgcttaaagattgcgaaccttattgatctttccccagccagctcgaatgccggaaatatcgaataacatggggctgtgctcccagaatgggcctctcttcacatcataaataaatccaatagcggagaaatatagattactttggcgttctctttcaacaatctttgcattggctaccccggctgggtcaggtgcattaagtagtgagccttcttcaggagttaggtcagtatcgttgattgcaggcgataattgtgcggatccaaagatataagggacaaaggaatgatcatcaagaccccagacgccgtgggagccagcaggctctaggttgtatgtcttgataagtagtctgataagctctaggtatctatatgacgacagtcagtaggggacgaagcatatctgacgtgttagattctgggtagacgcacggatggatcactccaaccacgatagctcgttcctccacacctggatcggccttgggaaatccattcagcttccatattccacctaggaaagctaggaagctgagttcatgaccggtaccatagtccaaccgctggccacttccccagctacccaagaaatatgatttcaactcggtctccgccgttgcgctctcacccgatgatcccctatccaagaggtcggccggtaggcattccctcagcaggtcggatgcgcgactttcgaccacctcagaccatctccggaagcttatatttccaaacctccgcggaccagtatctggtgggacctcctgtatgatatcttctagtttcaagagaagtccctgcaattgtcggaccggagcggagtattgtatcgcatcgctattgagagtccaagtttgtatagtgtcatcggcaagcttcagtggaaacatagatcggttgagttgtagtatccacgtcatgatatcagtataggctttggatgtcaggaaagccgatacatcttgcgagtcgtgaatttttttgttcggttcgataaatacgtgctctgcagagtccaaagtggccaaaacacgaatagcctgggcgtaagccatgtttgctgagaaaatccgaggtcggagtgggatgaggaaagaaagttggaggggaagcgggatgttatttgcggctccaccagagctcttccctcaccgcgtgttgtcattcttttgaattccccacgcgtttttgaagatggcgccaaaaagatccacacatcggcatcgatctaccgattacactcttggactcttgaataatatcaatgtcctccggcgcaattccacggatatacaggaccctaaaaggcgccgccgcaccaccgacacggatgtctatgatgttcctctctccccttctccgacaagaactcgaaagacccctcaaactgaaccgaaaaataccaaccggttgagtctgagaacccgtaaagtgcctaggccatcaccaccggtttcaccccccagcgtttctgaaaacaacgaagacaaagggcccagcaacgacgaatccgggtcaggcgatgacgagtcccaatcaattcaaaatggatccggcagcagtttaaaggaggaactggatgataaccgcgacgagcttcaacctgaggttgaacatgatccgttacccgaaccagtcgatctgttcccagccgcagacgaggatcgagctgatggtcaggttggttacgaagctagaagtgcacaacaagatgtatccggggatggatctggatctgaaggagaagaagagaaggacaaccagcctaaagagaaatctagagatgcacaagacaatccatctgaggacgaatccgaagatgaagatgatgaagagacggatgctcatgctggggaggaagtcatagacgcagaagacaatctatctgaaaaggacccggaatatgaagaagaagatgatgaggaagaagaagaagaagaagaagaagaggcagatgataattctcccgccgaagtccagaatcattcaataccgacccagcatattgcaaatgcagacacacccgacgtgcaaatccccgaaagtataccaagaaaccaaggaggtggcgcacatgtaagtcgcatgtcaaaaaatactcaaggattccagaatgcctcgtcacagcttttggaagtaccagagtcaccaacaatcgagccatcgcgcccaaatcaggaccatcgcagcgctcgctccgatatcttcacgtggctgaccgagaccacgaaagaatctggtttcaaggagacctgggacgaacttcgcaagataagaaaaattcttaaggcccaagctgctcccgctacaaaagagcatttcatgggcatcgtaaagctcattcagcggctacgaggtgtgtttgcaacaatgatcaatgatcctgcttcagcttcttccttgagaaaccagtgcaggctcatcgccaacagcatcttcaaagagaatcagtggatcatttacaccgaagccccagagaatgaagatgatggtgcccaactggtcaatcagctcgaagcccatattgttccccgactgattgacctggtcatacttggattcaagacctacaggacattacatgatcgggtggcgccacatttccgcattatcctggatttgctttggggttcctgtgataggatatcttctctcgtcgaggtgaattatgatattagtgcgggcgtggtggctcattctaaaagagcgatgcgacacgtgaaggctctaaaggatgcactgaaagatggccgactacgtgagacacctcatcgcatgccccaacgccatctaccatatcggccctttgagttggaagaggtcgatagccatatctcctgtggacggtggatccatgtagagacgaatgcactccgtgatggtttacaattatatgagggtaagactttccatttctcatgccatatgctattctgatggtgtcaacaggggaagatcgatatattgatatgaagtgtgacaacgcaatcggcggtcaactatccgagcgcatcctgcaacatatccatggccaagccgtcaaactcgggttggatgatccatgacctaattgagtattgggagagactagatcgggggtgatattagcggcattgtatagtaggctcgatttcaatacccttttgcgagactggagttcatagagaccaaaagtgtcgatgtatatatttggccgaggtattcatgtggggtcggcccgcgaaccacaaaccgcgaaccacaggcattgtcttgaacatccatggatgtcaaatatcatgtccacattgaatacagtatacccggaagctttattatccttcctacgagcgacaatatagatatttcggtaaaatttgcggataggtttaatatttgtgagctactcagggctggttttgcatcaggaggaatttcgtccttgggctcctgatcctgtgtcttagacatcttgggtacctacatgtacatagcctggtactttaaggagacttctaggacttagggagctattataatgcgtacatatgtaggtgcaaggctccaaagctacaagacaaatactatagagcaaaaatgaacacaattagtctgatcttggacccggtcaaagccagcctatattaactgtattctgatcatctagataaagacagagacaatatcagcagatcccccggatgcacgacccatgtagggggtctataaagaaaggctccaaagtatagagcagcggcgatccccccctcctaaattgacaccgctttctctttttcccgctttccccttttctcccccaaagcatcctgacaacatttgcttttgtcggtttaatttcctctttttttaaaaaaacaactgtgctggacttctctgggtctggagatcagtcttcaagtaattgtgaagatttccctttggaacggttgtgcggcgcgtgagtacattcttctcttttctgcatgtttgtttatagacgggagcttcggtcgagctggacaatgacccagttctgccatgggcatagctggaataccttgaacgactggggcaaaaagatttcatgcttatgcccagcgcgctataagcccctgacctggccattacagttgcatcgattcgagcgcttgaatctggggttgcgactccgagcataccagctggataattatgcgtttaggggtataacagctgacaacgcttttcgcagacagcttactggtacatgccaactgaaccttaccacgaagcttgccccctttaatacattaatcttgaacaatccaccgatatgtcgtcaaacgaaccggtcgtcgcccctgctcctgtggaggtcgatgagaatgagcccccagccaccccgatagattcgagcatcgtctctgaaagcgacgagttgcttaagcccagccccgaagtatccaaggaaagccgtgcgatctctccggccaaggctagccctgatacaccgagcaccgagaagcgtcctgtgtctggcgcatccaccaccaaacggcccacctcatcctccgcctcgaaacccacgacgggtaccacccgaccgacctccggcactctgaacaaacctcccactcgtcccccggccacgacaaccacccggaagcaactgagcacctcgactgtctcgtcccaccggtctcacaagtcagtcagcagctctgcagatgagaagcctcggtctgtggcgagctcaggagatgagaggcgcggaatctctggatctgcgaagcgcatgtctatggccggtacagcctcgacccgcgctcctctcaaacccacctcgtctttcgatcgtagatcgagcgttgcaggccccactgccgagaggaagcccgccaccacaagtgcgcgcaccgcgaccgcgacctcgacaagcaagcccgtgggcaggctgacttcgacgacgacacctgcaagccggactgctacttctacctccaccgctagacctgctactgttcggccaccctcgactacgagcaccgctaggcctgtcactgccaccgactccaagaagcgattgagtacgcttcctgggtcaattggccgtgctggtgattctgagaagctgcaggccctccagactaagctcgccgagagcgaggagaccgtcgctagtctgaagtctgaattggagactgtcaatgagaagctcagccagctttctgtctcggcccaagaacccctgggtgatactggtgccaccgaggccattcgcgcggatcacgccgcagagattgagaaattgacatcagcccatgccgacgagctccaggccctgcaagcgcgactagacgaagccgagtcccaacggaaagaactggagaagagctcgcaaaaggagttggaggaagccagacaatccgccgcggcgcaaggggatgacaggacagttgccctgcttgacgagctcaaggcaacacatcaaacccagcttgaggccatcgaaaaagagctggcagagcacaagtctgcagctactcacttcgaggagcagatcggtgctctgaagaaggaactcgagtttcaaaagcttgctctggaagaagaaaaagctctagagctcgaaaacttcaaccgagaactcaagggccgtgatcaggtgttagaaaatcttaacacggagattgctaagctgactacactcaaggagcaagaggtccgtgctgcggaagagtctgctaaggagagtgtttctggtcttcaagagcaagtagccgcactcgaggcgaagcttgctgcggctgagtctgctacccaggaaagctccgaggagaaccctttgatcgccgagaaggatcaagaaatcaccgagcttaagcaggcccttgagaaaattcaaagtgagctccaggaggcacgtgacgccgcggccactgaattgtcatcgaaggttgtggagttagagactgcccatgaggctgctatcgcaagcctcaaggccgaacatgaaagtgctatcagtgagatttcggcttcccacgcggaaaaactcactagtgccatagcggcggcggaatcgagcggggcagaacacaccacgcaaatccaggaactccgtgatgccctcgaggcgtccaaggccactgcccagaaaggacaagaagatgccgttgctgaactgaaggccgcacatgatgcagagctcaaatcactacaagaacagctggaggcttccgagaatgccctcggcgagtcccgccgtgcactggatgagggtaacgcctctgcacaagaagatgccgttgctgaaatgaaggccgcacatgatgcagaactcaaatcgctacaggaacagctggaggcttccgagaatgccctcagtgagtcccgccgtgcactgaatgagggtaatgcctccgcacaagatgttgccatccaagagattgacgctcttcgacaaaagtgtgagtcgctggaatcacaactgaccactggcactgggaaaatcaacgcgctgctcgaagaaatgcagctcaagcaagctgaagtcgaaaagatctcccgcactctacgggataatgaagatcactccaagcaagaaggtttacagaaggacaataagatgaaggctctggagcagaaggctgcagaagctgttgtgcttctcgaacaacacaccttgcaggctgcggatgtggctgagaagcacgcaaaggccctggaagagttgaaggctgaacatgctgctcagcttgcatccgaattagagcgggtcaaggaggcatcgggatctaatgaaagcgctctgagtgatcttcagatgaagcacacaaaggctctggaagaattgaaggctgaacatgctgctcagcttgcatccgaattagagcgggtcaaggaggcatcgggatccaatgaaagcgctctgagtgatcttcagacgaagcacgatgagttgcttgccacaaacaaggaattagagtctacccacgctacccggattcagtcgcttgaagctgatttgagggcggtactcgaaaaccacgctcttgagattgctacccacaccgagggtcgcgaaaaggagaccgccgaactccaaaatcaattcgaagaaacccaggcgaagttgcaagccgagatttccgctttgcagagttccagcaaagctgatgccgagcttcacaagcagcaaatcgccgaactgcaaaaaggctttgaagaggccaaaacccagctgcgggctgagatcgaggctgcccaaacctccaaggctgctgaaatcgatgctgagcacaacaaggcaattgccgaactgctgcagggatttgaaaagaccaaagctcagctgcaggttgagattgaggctgccaaggcctccagggccactgacctcgatgctgagcacaacaaggcaattgccgaactgctggagggcttcgaacagaccaaagccaagctgcaggttgagattgaggctgttcatacctccaaggctgctgaaatcgatgccgagcacggaaaggcgatcgagcagcttctaactatgagcgaggctaagctgtctggcctcagggaggagttcgaggcttctaataataccaagattgccgatctccagaaggcccacgatgcagcactagccagtgtcaacgagcagttgtctcaggccaaggccgctgcccaagacacctccgttctggatgacttaaaggccacagtcgccgatctgcaggccaagcttgctgattctgagaaggctcgccttgcggtacaggaatctgccaccacttcttccaaggaaattgagggttactcagctgagctcgccaagatccaggccgaccatgctgcacttggagagaaataccaagccgcggtcgcccaggtgggtgaactcgagagacttgccaaggactcagacagccagaagtcgcaccttgagtcgattatgaagcagctctctgaatcccgcgaccagctcctcaaggccaaggccgataacgccgccatctccgactcgctcgttgattgcaggaaccaaaacaagaccttgtccgagaagcttgaagctggcgaacgtgacctgaacgatcagatcgacaagaacatgggtctcctcaaccagcttggcgacgttgattccgctatctctgccagccgccgacgggtccgcgaactcgaaaccgagctcgcagttctgaaggcggacagtggcgagaagagcagctcttcgggcttggacgctagccggtgggcgacagctgatgagggtagcgacaacgctgaagatgggggtccagccacaacggaaggtgaggacctaggcccatccattgagggaacggtgggagatccccgattgaagaagtcttcctactcatcagatcttcccgcattccacccattcacatgattatgaagactattcagcgtatacagaggactaatacattccatagatggccagcctccaagaacagcttaggcacatccgaacagccagtgaggattggtacagcgagcaccacaggtcagtcaaatatgcgctcgtattgaaaatcatgctgatccctccagactcattgccgaacttgctcaactcccccggcaagcatcctccgactctcccagcccttcgaccacacccaattccgaagtcccaccagcccccgagccagaaccttctcgcacccgcgccgcaacagtctcatttttcgggagacgctaagtttcgcgtggatatggcacctttctgagctcttagtcgtgatgcagcacgacttaatcttgaatcctgtttcactctgctcttgtgattctactgtatgtaataactacgcaggataccctgtcttactatgtcggggtttcccactattcttgtttcaatatctttatcttacacatacaacttgtttgagttgaactttgtgtcatccgtcttgcgttactgcaatggtcagattggtacttactagcgagagatgcgtaagtggttcgatgcttggtccaagaatgcaggaatggataattcaagcgcaatgatcgaaagtctagaacaaagtgggtatctcaatataaaacaataaagttcaaagaacgcctttccccatgccccgaaatagtgcgcaaaggtgaattcaaaatcactccgagtcggaagggtagctgaccagcgctgatgtcggcgccacggcagaggaattgacttctgtgccactgtggtcttcacggagggatggagtcgaagaggtggcaactttcctcttcttgatgctaggctgccatgcattctgattatctgcatcattcaccaagaacggatcaatcatagcacgagtattcccaaccagctcacggtgtagagaagctttccgcgtcgcaaccaagtcatccttcttaagtcgcttcgaagaacgagatttcttctcttccggccgcgtctttggtgcaggcttttccgcccgctgctcaaacataggctgaagacgagtcatacgggcagcacgcacagccgggtcctcgccaaactccaccatgctcgctctctgccgatccccctcagtctcatccaaaagctcaatcccaagactcattttatccttgagggcctccgtcttcgccttagtcttctcaagccccttcctttgctgccgaaacgtcctccgcaaccgcatcgacttctcatacggatcctcccaatcgcgattctgccgttcctgaagctcaagaatacgagtcgcctccgtccgcgcacgaatcttatcctcaaccttaccctcaatcttcgaaaaaggatccttctccgagggatccatctctcgcgcgtacggcttgatagcaatctccccaggctgcagctccttatcctcgccagtatcacgtttccgcccaccttcggtaacgacatacgctgtgttctggggatcggtcttgatctcgatggtcccgccacatacggtgtgtttcatgcgaaagctgtatatcggcgtcgagtagtagttgcctacttttttcttctctgcgttgaagcgcacgccctggccgattattacggggtgcggtttgcacgttgtgcaccatactgcgaagggcatctcgaagcgcacgattagcgcgcctgttgcgtgcaggtggcgggcgcgcgcgccgagggcgtgcttccccnnnnnnnnnnnnnnnnnnnnnnnnnnnnnnnnnnnnnnnnnnnnnnnnnnnnnnnnnnnnnnnnnnnnnnnnnnnnnnnnnnnnnnnnnnnnnnnnnnnnnnnnnnnnnnnnnnnnnnnnnnnnnnnnnnnnnnnnnnnnnnnnnnnnnnnnnnnnnnnnnnnnnnnnnnnnnnnnnnnnnnnnnnnnnnnnnnnnnnnnnnnnnnnnnnnnnnnnnnnnnnnnnnnnnnnnnnnnnnnnnnnnnnnnnnnnnnnnnnnnnnnnngattagcccgcgtgttgggggcggggggggggcgcgcgcgccgagtgcgtgcttccccgcgagtttgtttccggttgttaggccttcttggtctggggggacatagctggtggaaatgtgagctgggggttatgtggatttggatgttttgctgaccgtcccatatctattgaggtggcatgttagttggttgtttcgtatgttctttggggtgggattaggacttactgaagccttgcatcttgggcgagttgggtaggtgttgccgtcggtgtaattgaagcttagagagtgtacaggttactggccgcgcgaagacagccagtccgagttgatagtgttgtagaagcgaagttgtcggcggaactgactttagtcggagatagcgggattaagacgggtgcggatgactcatcatttatttttgcatgtatacttgaagaagacatcaccagaaacaaaaaaaaccgaccattcaacaaagtagatcaaagaaagatttatcaggctaatcaaccataacgcttgatataatggtacactgaaatataccgacatacatcgacctcattcttacagcatgaacccatacttcgtcatacattcttatgaataactttttcgttacccaattttgctaaactatttagatagggtttctgggctgattcaagaatcagatttgcatttccttctctattcctcccttcttgcgaggcctccgtttttagtaacatccatcgcatccagtcgcccgaagccttctcggaaaatggaccaaggcacgcgcaaagagacagagcggctgatcttggagctgctattggaagacgtgaacagcaatatccataggctcggagaacagccattgccgaaggatacaactcacccgacctacagactagaagaactagagcctgacaggagggtggcacttcatatatggaaatccgaaatcgaaagacaaagggtcacattgagatattctcagatggctaaagctctatccccaggaagggaggtgaaggagacacaatttcccaagggaacgaagacattttccaaacatacctccaccgctattcagaagctggttcgctttttcaagaacctcatgcgatctatcaaagccctgattcccgcccacttctcactgccccaggtctgcagctcctgtagagaagtccacagcgaaatcttcaaaacacaatgctcccacttctattgcaagaattgcttgatccgcatggtcacaaaatctttagtagatgaatccttgttccctctacaatgctgccacaagaaaatcgaaggctcggaaatgaagaagatgatagggtccgcattggcccaagaacaaaggaagaggcaaaccgagctcagcgatccagaccgaacctattgttcggattgcacatgctctcgatatatctcgccagcgaataaatcttggccagatttgatctttaaaccggctttaacctgccagtgtggtgtacgcacgtgcagggtatgcaagaagagtgctcacgagggcaagtgtctacctcagctagactggttgatggagaaattgatgaacaagaagagttggaagcgatgtactaaatgcagccgtgtgattgagcttaaagagggctgtcctcatatcatgtaagtggttctttggccctttatcgaccctctaagctattacggggacttttaatgacacctgacagttgtatttgcagagcccaatggtgctaccactgcgggaagaaatggaaaacttgcgactgtccgaaatagggatgggaatcaattcaaaaaattgatttttatcactccaaccgatttatcaagaccaaccatgtggataatacactggttattctgactgaacttggcccggagagtaaaatatatgacctgagtacgcttggcttggaggatcctgatgatatatgaaattgctcaactacttatatgtgagtaatgtggtgttgccttctttcgctcaaggtaagccaattgatacttccatattgctatacaagcgaaaatcgagacacgtacataatttcagagtcatgcgtagtatatccatattaggcactgtataagctccgatagttccttggaagctagattttagatactaaaagagcgtattatttgtgctgtatggaggccttgcttttcgggcattcgcatgggtatacgtagtatcaacctcaccaccaactctcttttgccaaaagagggttatttattttcataacacatctcttactctagaccccttcatcacgtgggctacgatacggatcaggatacgcagtctctaagtcttacagctattattggtggacagaacgaggagacgaacgaactaaagaaataataaacaagatagggagtcacgttcatgagatcccgaaagaatatgggcacggccatttcaatgggactagggttagagacagaagatcacttggccaagtataagaagaaaagaccctcttccaattcattctctgtcgagattcggcaaactggcgattccattgaaaatgccatcagcttgaccgacacccccaaagttgagatttggcgtgaatgtgtctcctgccgggacgatcatctccaagacaatatgctcaagacaaagtgctcgcacttctattgcaagggttgcttggttcgcctgttcaaaaatgctttgcgtgatgaatccttattccctcctcgatgctgccgcaatccaattacggcctcgaagacgattctcggatccgcattggttcaacagcacaaagacaaggtgattgagctcaatgaccccgacaggacatattgttctgatttgaagtgcgcccgatacctcccacgaaatggcacgcgagctaaggtttgcaaatgcgcgagctgtggagtacgcacatgcaggaaatgcaaaaaaagcgcccacgatggaccctgtctatacaagcttgatgcgcttttggaggaattggcggattgcaagcaatggcaacgatgctccaaatgcagccgtctggtcgagctcagaacaggctgtaatcacatcacgtaagggcgatttcatttatcattgattactctcttcgctgtcttccactgtgggagcgtttggactcacatctactaggtgcttttgcaagttcgaattctgttatctttgcgggaaaaggtggaaaacgtgtccctgtatcttcgcagacgaagataatctttacgaatgagattgaactagccgagtcaagggagtgctctaggtttgccttggggcgaacaggataaggtacacaaatgatctgggagatcgacattacccagccctagcgtcaatcgatctcatttattttcaaggattagcctaaattgagcattaagtagctatcttgtcgacaatgaggcatttactgacctgtggtttctaaacatggagaaaaaagacacatatgttagccatcataattgcatagtcttctcagttatatagacttttctgtaaatacgatacaaagtactataataaggagcatgtaagttctttatacccctcattatgacttcacttaaaaaggaatatttggtaaacacggtcaaagttctcgatgttctaagactattccacctcgttttgcaagggaatccacaattttgtcataaatcaactcaatcactctgatttggactcagatcacagtgactaccaaccgagctatgacacagttaggagaactcatgagtaagattcggggacgcatcttcacgaggggtgcagccctgtcactggataaagagcttgaacaaaaagcctcgtcaaatcctaaaatgcaagggaagatgtctgcggtgccaggtgagtatgttatctcggatgatagcgatgaagacttgcttgatgaaggcttggatgatcagtatgagtgtacatgttgtacggaaaagtatccgcagtcggatattattcaaaccgaatgtgctcacacttattgtcgggaatgtattgtgcgcctttttgagaatgcccttgcaaacgaagcctcatttcctcctcgatgctgccgcctgccaattgctgtctctatcaccgtcgaggatatgataggcattgagattatgaagagatacaaggaaagaaacaccgaggtcaacgactgtcatagaacttattgttcaaactcaccctgctctcgctatatcccgccacagaacatccgccgtggggtgggaatctgccagtcctgtgccgctcgaacgtgcgccgattgcaaaaggcagggacatagaggtaattgcaaccatcagaacaccgagaagtgtaagcgtgcttctaaggcaaagaagcgtaagcgtgtttctaaggtcaagaagcgcaagagagcttctaatgccaaggagcggaagagtgcttctaatgagaaggctaagcaagcttatgatgacgagatgaatgataatttgctggaacgcctggcaaataggaagaagtggaagcgatgttcaaattgctctagaatgatagagcatatcgatggctgcatgcacatatcgtaggccgaatgctgctcccgtgaatctcagaacccttgaaaactgaccacgtcgtctagctgcctatgtggatgggaattctgttatgtgtgtggcgaaaagtggcggaactgccgtcattggtgaatgttcttctcgtactcaatcaagactttacccaagactatgctacgctcagagagtggtctcacctaattaggccaggtatttttttggcactcaatttcaatacgtgtgagtgacatataccatagtccaggcctcgaaaatggtagctcaatacactaaagatcaagaaatctatcactattcatgaggcctgtacaatccatccatagtacatatggatgggcttgtagtaatgccaggctactattatacataagaaatagcatacttaacctctgcaattcatcaatggtatagcgtatgaaccagctaccataacgcgaaagtttatccagtagtgcctgtattgcagtacgcgaaccaagcctctcttcctgccagcgccgcttcaaattatccacgtctctttttgttatacaactcccctgatttataggatcggtaggattggtggctgttgtacgacgaaaatcgaggataaaacgatttggaaagaatcttttcgcggctggagcaccgaacagagtatccgtgccccagctttaaacatactaaatctccggacactttatatcgaacgttggcatgcacccatccacctatttccttaccattaggactatcttactggtcggattccggttcattttaatacctcccctctgctgcacgatataactgaccgctgcttgtgtacatctagaagcttttcccaaggttgttgaatcttcgagttcaaaacccttggagtggcctgtactattctaaactaaagtagctcaacatagtataggtctctactattcctccaccccttagcccacgtgacttctgtaatccagtttcaatgtcagctccgaagtcacaaaaaagtgcagatgatagtcatgccaccttcccttttggcacacgtattgaaagtggagtgccatgattgacctctcgtggcagacagctcgatctcaacttatttgctttgatattttgtattgacttggcgtgtgtcggatgagctccatggcagctttgatagccataatcacagtcaattaaacagaagataaagtcaccttggtctaactacctgggtccaaaacgtattgctgctccgacgtccaaattaaagttccttttggatcattgttcttccgccccagatcaatccgtggatcagtctacgcggaagcttcgaatcaacagtggcctgcctgtcttccaatcgacatcatgttgcccaaattcttgcaaagcagctacattcgctataaggatgacaccaacagctttgcaacctggctccttaaggcagccggcaaatgtggctaccaaccccagggcctcacttctaccgcgcccacctccaaaaatggcaaaaacaagagcagaaataaggcggcaaatgactcagatccagtccagtacaccatgactgttaaggatcttcaattgctggctgatgttgtggccaagtctgctctcactgtgcctacacaagttctcatcatcgtcaaaagagcgatcaaattgaggaaacatgtcacgtcttggtttttggggcaaggcgactccgacaataacaagcgacacactcattttatctccgcactggaaaaggtctgtgagaccctggaatggaagatgaacaactcttccaatccggatagtaatcaacctcctccaacctccgaatccggaggtggcgatgccgaccttgacatgttcctcaacaaatttgctgtacttaccgtcgaggagccacaagagactcaagagggacagcagaaatcccccgaatcgaaacaggttgtgaaggtggagattgttgagaatgacgaggatgaggacacgagttatttccgcctcatattcttcaaaacatactgcatgttccaggatttgaacaacatgcgggcgtttatctctcatacctggtcagagtaccgagataacaagatcgatcttatgaacgctgctatcgtgactgacagtgcgttgcaacttgcccgagatcttgtgcaggaggtggtggatgactggagcacatccaccccctctatcgataacctccaggaaatggtcttcaatgtcgcttgttttactcggggcatcgatgcgaccccatctattgaaatcggcctaccatataataaacacatgtccgatgtagccgagtggtgctatttgccaacacggatcttactggaatcattccgagacgttctgcaggataatcatcttccggtcttcaagaaaggctttttcggcacttacgatcccaaggctaacagagaggggatgtccgtgggccagaaattcaacgaagacaaaatcatttttgtccaactaatgccagagttctgcatgatcgataagtttggtattcgtatgcttacctccgatgcgattactgcaggtcttgttgagttttgcaggaccaaaaaggctaccctgtggcttagcttcgctgcacaggtgctccttgacgttcatcacatcatgcgttacagcattttaggtgcatttgacgaccttcggatgtctggactgcgtatcacaaaaactatcgacgactacttcaagggtaccaaatcacacccgcagccccagttctggcccaaggagggtgatgaagaaatcaaagatatacacttcactgtggcttcatggattatccaggaccccttcttagaacggaagcgtgtttcgatcccaggctatgatgtatcagaaaaacatgtgcttttctctcagcatgccatcctttgtggattgagcctgtttcatctcaacacccggatgcagtctgttggccaacagcttgtgactcaatggtatgatgtccagcaactggctttcttgtacaatctcgcaaacactgatgggcatatgaacttgatttggcctgatatggaagcgtttattaagattcacggagagtcacatatattcattggttctcgaccaaagaacgctagcgagtctttgaataggcttgaattggccacaggcatatcgtccgccgctaagtttgcccgcggttcgcgcaagagacaagacttccatcgccctgatggaaagaatcccagagtgctgacgccaacaactacgatcgcgaacttgttccgggcccagtatgtgtctggttttagggaagaagacggcattagaacaattgacaatgttctggatacgctttctcaggaaccgtgtctcagggagaccagcaaggagctccagccctccgatctgcaagtcatgttccaacagaagtggtcccatacccgaaatattggcaccctgcaacttcttactcttttgaagagcaggttgtccaaagaagagcctttgctcctattcaactacttcggcatgcacaagcgctccctggagctgctgaggctgatcagagcaaaagaacatcacaagtttgtccaatattttacgactgcgtacatgcccgatgaatctctcatctcaaacattgtgattctggtccaccatgttgcgcgaggctcggcacaaaatgcgcgtgcattgggaatgtcttccatgggcaatggcagtcagatttgcagtcgaattgtcatgagctgtggtgaagtcatgcgggattatcttcggaagaatggagatgtggcatgcaaagagctaagggttttctgcaagaacaaaaagccaatacaggatgagatcgactatgataagggcaggtccgaggagtttggctactggtttggtattgaagaggctttagacccaaaggttctcgcctcgctcatgaccgggatcccaatagcttagctgatggctctggttaagctcttcaacaatcgacgaatacaagggggattttatgtatcaattgcccttatttatgtgatattgatgcattcttatgtctgacatatactactggcaaaatatattgaatctatacgctatgtacattctcaacgaccgacgtcttctcaacattcagtcccgtcttagtctcaacatgctccttattcagcttagcttttagaataaaagccgaaaagaagacaccaacagcagacatgcacgtgtaaagaatccacatattcctcagactccaagcaaaagcctccctaacagcaagcaactgcgtgggatcagtaatgaatttaatcgactcgatactcgcagcagccgaatccccagacatctgagccgccatgctggtcgacatcccggaagccaacaagctggactgtttctggcccatactgttctggaagacgaccccgccaatcacaatggaggccgcagttgccatattgcgaatgaagccgatggttgccgtagcggttgcagtgtcctcctgtgagaccatggcctggatggcgattatgggcgtttggaagaggaatccggcaccaagaccgccgaggacctggtacccgactatctcgccgacggaggatctcacgccgaggttgatgtacagcccgttcccgatggtcattagtgccaggccgatccagatcagttctaggtatcgacctgtgcggtggattattgcgccggtaaacatgccggagaatgcttccgtcaccacaagtgggagaatgaggacgccggagctcattggtgaggagccgtgcacggattgtaggtatagggggatgtagtattccccggcaatgaagacctgtaagtcgttagtggttgaaacgaccaaggggatgctatactaacaaagccatgcgcaaatgccactagcaaggtggcaatgttagagaatcgggtgaagatatccatgggcatcaagggatacttggctagtttcttctcgctatagacaaacagcaaggaacacaaagacccaaaaacaatgagacagatcacctgcggtgatttccaggcaaacgtctcgccgccgaagtccaatcctaatagaagcatgagagtaagacccagcacagagaaactaccgaaccagtcaatggcgcggacgccatccataattttcgtctgggggttgtgcacatccaagaaaaagaaaaggagtacaaatgtcacccccgagaccgggagattgatccaataagtccatctccaagtgacatactggctgaaagcacctccaagcaacggtccaaccccaccagcaaaagcccacatgacctccatcaggccgagatataaactgcggtgtctgttacgagtcagtaaacacagagaagccaaaagcagataacccagatatcttacctgacactgaacaaatcggaaataataatcgtaaccagctggagcaaaccaccaccagcaacgccctgcagcgctcgaccagcgatcaacatctccatactagtagcagcagcgcaaacaatcgagctgaggaaaaaccacccaacagccaagagcaagataggtttccgcccccagatatcagaaagcttggcccagatacacgcgctggcggcggagctgagaaggtatgcgccgccaatccacgtatacccagcagacgagtggaagtacgcggcgattgttgggatcgccgtggccatgatcgtttgatctagcgcggcgataaacatcgatagctagtaggattagtaggtgaatatgaggatttggttcgtatcttactgaaagggctaccataatagcggcaacttggactttgcttcgccctttgggcggagcttcctggatttctattgatgctgccatttctgagagatctggagttggagatttcaatttttgaagttgaagacttgaaaatatttttcggatcggttttgtggggctcatctggtatggattcttagtcggttagtatggtagatgatactgatcttggatgagggtaagatatagcgttataggcctcgtttacatcagaaaagagtttgaatgaataaaaaagttccatttgtgaaagcgccacccacatatagtcagtatgtgctaactcaacgccaacgaagacgaaaaaaagagaccccagtaaaccagtagtaattcgaaacgaagtattagccaaccctcctaccaaccgtaactccaaagttaaccagcgccgtcgcagactcacaatgagcctcaaactcgcgaaccagcccatcaacaatcccacgtgcctgcttaagatcctcagcttgaccgataacaaccatagaaggtggcgtcagcgcacgcatcacacccgcgacccatttctgcgcgaaaggccgcatatggtctttcccagcagtagtgtaggtctcgcggacgacgtcggtgaacccatgcgcagagatctgatcatacacgcactgcggcgcaaacggccatagacctagtttcagcatggcctcgatcacgcatgaccgcagtcgggttattgctgttggttcgggtaccgcgtctgtgcagaacgctgtgtggtcgacttcttcccattggatccagccgtttggttctgcggttgttttgttagttgggagtccaagtttgagagtagtggctgttttttttttgtggcgagagtaagaggtgaggaaagacatacttagtaaagcgcgcgcgttggcgagcacacgtgcgtaatctgcttgtttcaagcctgctgtgaggagtcggatgtgtacgaggtcatatcggccgcggtgagcttctgggaacgggcgcagtgcgtcgtggacgcttagtttgattggcatctggccaggtcgttggatctcgtggccccgtgggtattgggctgaggagatgtcgaagccgtggagctcgactgacttgttcgggaggatattggcgacatcttcgagccagacgctgtagtgggttagcttgtgtgtgacagtggttttggtttcagatcctcaaatcaacatacccagtgccagtgccaatgtcggctactgccgtcaggtctcttggaatagacgggtgaatgacgttggagagctccacgagaaagcgatgctggtcattgagactatcaggtgttagcagggagatcgatagatattcccaggaaatatttgaacataccgtgtagtctcggcctcatctcgatctagcaggtagactggcgagacactccccatattgcccaagactttgaaaagcctggacaaattggagagaagtctctggaacgaggaaaacattttggccattttggtaaggtagcaaacacgaatgagtttgatgtgaatgagaaagtgactgacagagtcatcttcctcttcttatagtcttttctctgatcataaaattctctgaatattcaaatatccaaatatccaaacctcaatcacctcaatctccatatgccagcaaacaaagaaagtcatcttggatctccacataataaccacgcgctagttcacatccccgcgccacgatcgaacggattgacctatccgagactcttcttagatcttgagtattagacgttcatgcatggaatcccctattcggcttaggccgagtttcttgctggctagtgacatggatacatcaaactcagcccaatatccagacagccttaactttcctgttggagaggggcttatacgagacatctgtacatggtagaattgggaagtcggaatgcaaaagtcccggcgtcgccgtggtcgtctactccgtaaaaaagccccaaggcgttgtcttttggctttatggcgtcaaacggagtgtggaatacggactggtcatgagtctacagactatcggtctggaggaattcagatgtaatgaacgcccaaagaatgccacatccccgaaatagatacatatcaaatgtaattttagacagttattttacaaaatgagaccccaaaaaaagagagataagacaccattggctctcaagacttatccaccaaattagcaaacacataccggaaaatctcccggctcttatacaaattctccacccgcatgcgctcgttatccaagtgggcgttgtcactcgcctgcccacaaggcaagttagctgccggggccgaaaactccttttccaggaaccggatggtcggaatcgacccgccctcacggatgaacatcggtttcactttggctgcgccaggcgcaacaggcggtgttctggcaatcggatcagacttgggccggattggcaatgcaactgactcttcactcgatgtcgatgtggcttgtgtgagggtggatgacgttggcactgtggaggccgtttgcgaggaccgtttgcgcgcggcttccttgcctgctgatgaggtcgttgtcgatgtgattacccgctcaacgtgcgaggctagactgtcgtctgagtctttccggcggagttcagggattgggcccgcgctgggtttgggcttgctcgctgggtgaatgtttggagactgtgcgataggtaggtattggagattcgggtcctcttggaccggggtccacgctgcggtgatcgcctctgacagcgtggcgaagatttcgttatctgggtctccgagccaggcgtcggatttgccagtgatttcgactgtgaggtcgttttgtgagtcgagcagtgcgaattgctcttgtgcataggcggtgaggtcggctgcgacttcgtcggcgtgctgatcaggtacgatacggatcgatagagttgccttggctcggcgcgcgatggtcgttgcgctcttgcttccaggaacttccactgagtggacggtcaaggcgggttcgcgccagcgatgcgtcaaggacttgatcagcgcctgactgtcggggatctctgggtgctgcacaagcaatacatcggaaatagcctcaaacctcttctgctcggcgtccgtgagtggcctgacagcatcgtggaagccaggcagattaattttgcctttgcgtccgacaatcgtggacaaaagcatggtaatatctttgactggttcatccagcaatgtactgccgtcgataccactgtgaaggtcagggtggtcgctagtcacgaccaaattggcgtgcacgactccgcgcagcccataagttaagcacggattgtagtcatcaagccagtaactgttcgctaggagaacccagtctacagatccgatctgagccttgtgctcgcggactgtttcgtggaaaccttgggatccggattcttcctcgccctcaatgaggaaaatgacgttgcatcgcaaggtcttcgtccgggcgagatcagccgcggcatacagtgatgccagaataggtcccttgttatcagagacaccacggccgtacagaaacccgttaatggaagtgagctgatagggatctgtcctccacttgggtcggttcgtctccgcacccacaacgtcatagtggccatagaagagaatagtcttgtccaccttttcaggtgatgtagcgttgaatctagcataaacaatgggattggtgtcctggccggtaggcaggagcttggtcttcgcaccgaggtagttgcagtgtcgccgaaggaaagcagcaccctggttgcattcgccagcgaatttgggacttgctgagatagtcttgaaagagacgaactttgcaaggctgttgaccatttcgtctgggtaagatttagcgagcgttcgacgcgaatagactgtatgggacgtaccgttgctgatcggaggaagctcttcctgggtcgagaaaaactcagtcagatcccagattcctactgagttgtcatttccaccagtggcgtagagctggcgatccttgaaccgtccaacagccgaggcgagcatggtgccctcgtgagcgacccagccaccgacctcttcgaaccgagagttgaatttctagcggcggtcagcggaagtcgatttgaaggcgacaaaaatagaccagtacataccttgaccgttccactagagtcaccacaaatagcgataccctggatcacgtgcacagcccacagatcaccggtatgtctagtgatccgcttaacgagctgctgagagtccaaattccaaatgttaagggcgccgcccgccaagccacagtagagtagtgatccctcaacagcaacacttaacacaggatctccattctgtagcttggcgatttgggacggagccgcgccaggatcctgacccaagcgccacaacttcaccacaccatcgcccgcaccagtcaaaagaacctcctcggaaggagcggattcaaccaggcctttgactagaagcatagagtagacgtagccatgatgcgcgaatagcttatgatgatcccgcttgaagctcaacacatgaccaccgtcggagagggcaccatccgatgatccgggagctcgagtaccatccggtcctcgggaatcaaagaagcgatgcgtccgtttggacggatgggcggacgatgcttggttcaatgttaaaccttcctcggaaagatcacaccactgtttgggtcagaatgtcgctaaatagggtacagacacgggtcaagtacctggatactggtgttctgtgcaccgcagtaaatagtttggttatcggatgaatagactactgaaaatatatcgcccacatcgtggtgtgaataaatcgagtagagacgctcaaatgttcgcgtggaccacacctatccacgtcattaatcccggccccgagattcttcaattgcatgactcacattgatcacggagtcgcccccacttgaaaatagtaagttcccatcttcggagagataaaggcctagcacactctctttgtgtgcgtggacggataccacgagatcaaaggtttccagggaccacgcctaatgaaacggttaggctcaagccttggcgtagcaaaacatagacagaaaagaatcgaaactaacgacaatatctcctccttgcaagccagcaaaaacacagtgttcatcaagagccagagcgagaacggagcgactggcgagcacgcggtgaccgatgccgcagtcactatttggcagggcactggcatcggcatgagtatgagaatcagactcccaggttttctgatcctcctcggacgtgctttctgattcgactaagtccataatcagtccaatatgctttaattgcaatggtctgcaacggtccaatggtctgtgatggtcgttgtggagagtgaagtgatgttggtgttctcgttttgtctccgctgcaaatgaaccaaacagaacactggaaatctcccttcactccattctgctttctttttggttttcgaggttgaagagcttcagtttttttggggaaatgcaggaatacaaagaaatatcaaagaaatacgaatcatcaaggcggtacggcaaaaaaaaaggaaataatagcaagaagatattgcaccatcgataaagtatttgactcaccatccctagcatccctttgattccgacaacaagtccttctatggagaaaagacatcagttgtcgaatccattcgcttgagctctatgccacggtcgcatgtccattgcgtgggtttgaatattctaggaagtcagaactatgagacgcaccttggttcccacaatagccgtgctaagggggtactggggcgacggctgatcatgatagtgtatgtacggagtatgcggttcaagattcaggatggattcgagatagatttagatcgagtgggtttgcagtatcaatgaaaatagtccatgaaaagacaatgaagtgcacaccgatgttgatctgcactccaatggaatcttgaaagctttattgataagggagagatacctacatgtactccggacttgccagctgagatcctgcccgagacctactgggcgcaacgctccaacccctgatggctttcttcttcagccctggactagaaacactagcctgcaggtgcccatctatgatgaatgtgtctagggtcatcttacaagaaccagaagaaccccggacaatgactcggaatgaaagtgatacaacagtaatggcgccattatcggtcttgatatggtcattgcgggaatatacctcccacaactgcccatcggtactctatactccgtagagacacaatctatatccctggaggaaaaaaaggagagtctccggggtcatctcacatgttaaagcctctcagcaccgccacacgaggagctgacgttgtccgacaccagccacagtggcggtgactcctcccagccaatcagcggtcacatgtcaccgctctttgcacgtcttcctcctctggcgctatctcaccagctgatcaacagcccatgcagactacactacaccccccatgtacctacgtcaaaagagtctggattattcctttttcctttgccctttcgccggaatctaaatataacaatgtgatctccctttccctgaaaattctcttccggatccccgcacatgcagctataccgcaaagatcgactttggcgcccaacagcgttcgagtgcgtgtgttgtgagctcatcgacttggctagtctctgatacgtgtcggtctcctcaagtctcatccaattattcttccctatagctctgtaatctgatcctgtttgttgctctgcccaacgtggatgcgtttgacccccccagcctccgtgtcccgcatcacttctccaaggccttagaccctcgttgttactccgatcggtccttttgtgctgatcaaggcctgaggttaccaacccaactgctttattaaccgagagctctccagggctgtaccttgcttattatcctataccctgcttagctcttcgatacttgatctataccccggacaattccttttgaaacagtctgtgtccccttcaccgcttccttatcggctgtcgatctcgaccatcggatgactgattttcggtaaggtcgtcgcaacgacatactctctgctatggcaccttttggtcaaacgatcgctgtgattgacaagaccggcaaggttgtgagcacggtaagttcgatctccggcggaaatccgagcattctgaccaggattagagtaagcaattattcggtgttttcacccatgccaaaaacgcctatcgggagcgcaagtctgccttccaatcagaacgcaatgcaaaaattgcagagcaacaagcactcgaaggactcgccaactatcagatcgatgattcggtagcctcttctgaacggaaccatgggactcggtcaaagcatcacagcggccacggtcgaagctctcattacgggccatcggcagcaatggcccgccgtcacacctctcacgatgtgtcggtccgaggtgcccctcgtccaacgggtcggtcaaaatcggatgcgcatatcgacatggatcttgcatacggagacgcctctcatgcagccttatctcgatacaaccccccagagcccaaaaacgaccaacaacagcttgatgttcttgtcaaccgtgcacagtggattcttgaagaggcacactgtttgcatcatggtgctgccgcgaccatggcccatctccagcagaacccaaaagccatggccgccgtcgccttgactctagcggagatcagcaatctggcccgcatgatggcccccaccgcattagcctcgctcaagtcagccgcgccagtcgtcttcgctcttctttccagtcctcaattcctcatcgccgccggagtcggtctgggcgtaacggtcgtcatgttcggagggtacaagattatccaaagaatcgcagccggtgctatgggagagtccggcaaaacggaagcagaaatggaagaaatgatggagttcaacacagccgaaatcagttctgttgagacgtggagacgcggtgtcgctgaccagcaagtctacagcgctggaacatctgtcgaaggcgagttcatcacacccgtggcagcggccatgtcgggcattgatgtgacgactgctcgggcgacacgggatcctcgtttcaaatttgatgaagatgcctcggtcgcttcatcccgtcgctcccgtcgttcacgcaccacccgcgctccggatcgacgcgatcgaaggtcaaaagctcctttggaggaaccgagtgggatcttcgggcgaagctcctccaagtccaaggcgccatcgaatgttcccagccgcacctcatctaaacacggcacctatgtcaccgaaactgagaaaagggagaaggagaaaaagaaagctcctagccggctacgccttatgttcacctcttccacttgacacccaatcctctccattcgacagaatcataacatgtatatccacctgtctacgctcttccgatgttatttatgggcgcagatgcgtttcatacggcccattcagtgcctttgatccactcaactcttacgacgacccatgacatatgcgtcacttcctcccattcaatatttctttttggatatggttgtcgctcgctttctatttttcttcatcttcattttccttcccttcttctccttcttcttcttcctcttcctcttcctcttcttcctccaactactttcagctatgcagccccttcacgcaagcatattttggtgttcattggcggcatctgctgtattatacaaacaccaaagaatcatttagatgaactacatatcttaagaaaaaaaatattttctatcatacatattctgctacgtgttcttacactattgatgtctaactcggatatacatgtacaatcatcccatccatcaattgccaattaactggtaggcaagttcgtctaattgaccacaagagtgccgagcctctacatataaagtaagaatagagatgtaggtaggcgcagaacacgctaatatatataatagtcctgggttcatatggtctgaggtagattgatagttagcttccagctctcataagtgatagttagggagatcttagtctttatgaggtagatggactcttgtcccgtattagcaatgacctacctcaaggagacctactccgattaagttagatcatgacttccagctctgagctcgagacagagaacggtagaattcgatccagctgtctgtgatcgggagaccaagcatcgagcatagaatatatacactaattcatctaccatggcgccgaggaacctttaacaatgctaaggctaggtaactctttgatattctgaatactagtcatggtgttctcaaagaaagccaatgatcgacatcgtaaaccccttggtggatacttgcacccaagctcaggggcacagccctctatgctatttatgttgtagagctttgaagatagacaatctatacagggaacatctacatttgaagagatagagagcgtgtaatcagcaggatagtcatcgaaccccagtcataatatccaacggcaatgcccaatccatatatctgctgtgaagcccaccaagatgcatcatgctacaccaaaacagccctcgcagggatcgaagtgaaacccagtctcattaaggccccccgtgggagaaatgatctgacgttagccggcagatgaacggtttccaaacagccggaggtttcagcatagaatatcccccattggctaattccatgctgacccctgtctactcccggggaatcggaggtgcacgccataaagccggagattattacatagtatgtatgaccatttttcccatttcccatttgggattgaggctggtggcggtaagagaatgtatcaaatgcagcatactccctaggatctgctttaaaccctcaaatattcgacatttatgcaatgctgggtggcccggagggacccgttagcccccacaggaagccgcaaagtaccctcgcttggccaaggacccaaatgctataagggaatgatgtcccctttctgattcctccgatatgggaggggtatggagtagataagagggtgagatgtggatcagtgcaggctctagagcagctcgggatctgataattgtatgtttgttttgtgagatttcgcctcgttcttgaaatagcgcaatcttttgaacagacatactggaggggtaatttcgtagagtacttcaaggcctggtttgccagaaatctagtcatttgatgtatttattctcatcatacattgctccaatcctcctataacggaagtttcaagatggagattccaagggcaaatgtgcctttagatgtgattgttgtcgggtaagatttccgttgtgcatggttcaacatgcgagattgtcatgctgatgttttgtagtgctggtattgtttctgaacgccgaagagctgcattggctcgagacaggagttgtattaaccatgattgaataggcatcggcggtatggcggcagccctcacattaggtcttcgggggcaccatgtcattgttcttgaagctgcacggaaggtatatgtcgaccgaaattcatagtatatcaagcaaggctaaccaatcatggcagctcatggaagtgggcgctgggattcaagtatcgccaaacatgctgcgtttattcgaccgtgagtctgccttctgccagaaaaatatccatgctaaaccggtacagggtggggagtctcggacttgattcacgcccaagacgtagccctagagcacatccacgtccgaagatgggataacggtaaactcctcgacaaggtgccggtgaataagactttcgggcagcaagtcgttattcaccgcgccgacctgcacaacgctatcatcgacagggccctagcgttgcccaacattgagctgcgtgagaactcacccgtcacagacgtacagttctacccagcaagtgttagcctagccaacggcgaaatcattcgtggcgacgtggtaatcggcgcagatggaatcaagtccacgatccgtagccacctgctcgaagactcgactattaaagcagttgcgactggcgatgcggcataccgtatcatgatatcccggcacattatggagaaggatcctgaactgaagaagctcattgacgagccgcaggtgactcgttggcttggtccttcgcgccatattgtcgcgtaccctgtccgcaagcacgagctgtacaatgttgtcctccttcaccccgatagccatggtgtcgaggagtcttggaccacgaagggttccaagcaggctatggttgacaactatcatgggtgggataacacggtgcggaaactgattgatctggtcgatgataatgaagttttggagtggaagttgtgtctgtaccgtcctctgagaacatggatccggggatctgtcgctctaatcggtgatgcgtgtcatcccatgctgtatgtgctcctgagatttggctgttggtttcaagactaatctcgccttagtccgtatattgcccaaggtgctgcccaggccgtggaagacgcggccgcgctcggtgtaatattgtcggctatttcatcacgcgaggagattccgcatgcattgagtgcttatgaaaggtcccggaaaacgcgcgctgagacagtgcagcactctggatcgaagaatcgaattacgttacatttgccggatgggcctgagcaaatggctcgagacgcgctgttcaaggcttcggacagcggaagtaaccccgataagtggtcggatcgtaggacacaagagtttctttggggttgggatgcagagaaggcggcgttggatacttggaatggtatgttccgttatttcctggtcatgtcatgtgctaacttgcggacagaagatcgaggacagaccaggctcaatgcgaatctgtagattttgccgacacgatacatcacctgctcataatcggttgtggtaaccataaagggactcgaattagagtagatatacttagagatagaaatattcacttcattagacgcatgagtgagctcgttcaattcatacaagacattgcatttttgctaccaattccttaagtgttaatattttctagttcattatacagtcattcgagcccaagaccatccatcagacatcggtggaacattggacaggtagacttgacatgttggcccgaggaagccagggacggtcaacatttggcattccaatcgttcaaaattgaacaatttacaacctctcgccagcggcggccttcatctgaccgtacttcttgagacgaatggcagacacgttgatgaagccagtggtctcggcgggggagaagtcaccgatctcatccatggaagactcgctcatgtcgtagagcttctctgtctcggaggagcgaccgagaatggaaacggtgcccttgtaggcacggcagcggacctggccgttgacggacttctgggaagcggtgatagagacctcgaggaactcgcgctcgggggagaagtacatgccgttgtacaagagctgaatatgttagatgagaaaatagaatcatggaaagctcgtgcttaccttggagtagttgtaggtgacgaaagtatcgcgcagagcacggacctcacggtccataacaagaccctcaaggtcactagacgcaagttagttgtgccataagaaatttcgcaatacaatactcacaggtgggcagagcgcaggcaggtaagaccgggggtctcgtagcagccgcgggacttgataccgatgaaacggttctcgacgatatcaatacgaccaacaccgttgcggcgggcaatggcgttggcggtgaggaagagctcgacagagtcggtagcaaccttcttcttgccaccctcagtgtactcgagcttgacggggacacccttctcgaagtagacagtgaaatcttcgggctgatcgggggcggtcagggggtcctgggtcagcttccacatatcggcgggaggagtggtatcggggtcctccagaataccggcctcgtaagagcagtgcgcaaggttctcatccatagaccagggcttagacttagtggaggtgacgggaatacccttctcctcggcgtagtcgagcaaatcctggcggcccttgaagcgctcgtagaagacggggtcgcgccatggggcaatgaccttgatgttaggctggagggcgtagaaggcaagttcgaagcgaacctggtcgttacccttaccagtgcagccgtgggagacagcgaagcagccctcgcgctaggtttgggtcagtatgacatctttctgctagcagcgaagtaaagcgtacctgtgcgacctcaatctgggcacgagcaatgacgggacgagccagggaggtaccgaggaggtagacgttctcgtagacggcgttgcaagcaatggcggggaagcaaagctcctcgatgaactcgcggcggatatcagcaatctcgcacttgagggcaccaatcttcagggccttctcgcgagcagcctcaaagtcctctgcaaagggttattagaccggggttggatgataggtcgacggaattgaatttaccttcctggccgacatcggccactatgttcatattagtagttgatcttgattgacatggcattgaatcgacttactgaaacagacgacctcatagccctcttcgatgaggtacttcactgaaattcggtattagtatcctcaattggttaatgggttgaccgatgttcatacagatgcagctggtatcgagaccgccggagtaggcgaggcaaacctgtgtcgaactgtcagaaagtgtggatcgggtggcggtgtaagatagaatggggacttggggatctgataagggagcgaaagcaatagttcatacctttccctgtgccattgtgaggaattgaatcaaattcaagaagacttaagacgtggagtataaaacaaaggaagattgagtcattggaaaaaatgtcaattttggtgcgggccggggaagtcacgggtccgagatgataaccctgataagatagatcgttgcccctccaatcttcgtccaactcaaattcgagataactgctccagggctagaacaggcttataagtgatggctttcagacctttcacaaagagatctaagctgtgaagctcattatgaatagtcaagtccaggattcattctgtttcccatggaaaagacgagcaaagatgtatgtttcctttcaagataccattgcagaatatattgagtccgatccattggaaggcagtgcataactagcgtatagctccgtcattctatgttctatgttttacattcgatattcatatttgcatgatactgtcctttatcagggatactatgctgtatgttgacttcgtgataggtccggtctgacttgtgtgactggtttgccctgtttgcatcatctcggctatccgcggcggtttccccgcgcaatgcccccgacaatgaacaaggagcaatttaaaggcaatcatccctacaaaaaaaaaatattatgtatttccattctgttcacatcccacaattctagccaaagatggcttctttacgaactcctttgcggtttttcgctcaagctcctcgccggttctactctggagctcctactccggcagcgaagctaaacctacctattgactacaaaaccactccgattttacaccacacctcagcctccttgtcaaatacatcagagtacccggcagctgccacgagtaaacgactcaatctctaccaagcaatcaactcagcattgcggaccgcattgtccaaatccgatcgaactattgtgtttggcgaggatgttgggtttgggggcgttttccgatgctcgatggatcttcaaacagaatttggatcggatcgggtcttcaacacccccttgaccgaacaaggcattgcgggttttgcaattggagcagcagcggaagggatgaagcctatagctgagatccaattcgccgactacgtgtttccagcgtttgatcagattgtgaatgaggcggccaagtttcgctatcgagagggtgggacgggcattaatgttgggggtctcgtcatccgcatgccgtgtggcgcggttggacacggtgctctgtacgttacgtggagtgccaagcaaagcggtatgctaatcaactgatcgaatagataccacactcaatccccagagtcgctcttcgcacatattcccggtttgcgagtagtcatgccacgctcccctgctcaagcaaaggggctacttctgtcttctatcttcgagcacaatgatccggtgatcttcctggagcccaagatcctctatcgtgccgctgtggaatatgtcccgaatgaatactacaccatcccgctaagtaaggccgaagtcatcaagcctggcaaggacttgaccgtcatctcatatggacagcctctttacctgtgctcttctgctatctccgccattgaaaaggctatgccgggtgttaatgtggaacttattgatctgcgaactatatatccctgggatagacagactgttatcgaaagtgtcaaaaagaccggtcgagccattgtcgtgcatgagagtatgatcaactacggcgtgggtgcagaggttgcctcaacgatacaggagagtgcattcttacgtcttgaagcccctgtcaagcgagttgctggctggagcacacatactgggctgagttacgagcaattcattctgcccgatgttacaagtgagtgcccaacgcccttcattcttcatttcgttctatcatcactaacccatagtattctttgtaggaatctacgacgcaattaaacaaacacttgaatattaaactgggatgcctcctaggagattataatgatacgaaagccatttttacctgagaacatcatccacttgcatttcaatgattgtgaccaggtccaaggaattctatcaagcaaaataacaatgccaaggtgaactttgcttactcgcaatagtctgtcttgttctcaatggcttcacaggaaatattaaatactgtttctagttgccagaattgacacggtactacaatatgttgttaactatgtacatcttattattttcaaggtctctcgaaaccatttatattatatctcttctttcaagtatatgggtgtttgcattgtcttccctttctggctgttccctcgttctcacgtgtccatgtgccacttttcaccgtcgagcgccttctttcccatcttcccaagctctttaccttcttcacttaaccccattcaacttaaatctatgtctggctcctatatcttgttccctcacttgtttcacgatgacgatacaattgatgatgtgactcttgctcttttgcaatggcgatcagcgcttcgacagcaaatgagaaccaacaggacgttctagcggccacgaagatatcgacacaacgttaggaattaggtatcttgcgggagtgcactacttgttcggaaagttatcctgagccggacacgattcggaatagctgcccacacgtttactgccgagggtgtgtcatccgccttctccaaaacgctctggctgatgaaagcttgtctcctcctcgttgctgccgttctcatttgccgttggaagctgcgcgtggcttcatcgacgatggactgtgggagggatttgaagctggatgcctggtttcattctcaaatgctggaattgtggactccaagcatgcaatttctgccgatcgaacaggctctaattgacagcccccttttctcaacctactttgatgcacagggtcagtctccccttccccccgggtcaacgcctattctcactcaaagcaattacagggaattggatctccgaaccaccaatactaaaaacctcactcgaggactttgtcacaacaatcccaccgggggaggagaaatatcagtttttacgttttatacggaaaattctgacctgggaccaggaagtgagagccaccgcgaacgaaattataccggacgaatggcttatgaggctgctttgaggggacgctctagggagaccctcgggtgtattcggtgggcataatatccctagttttcagcattgtctgttaatggattctacaatatatctctttaataactataaaaataatactacggtaacctccaatttgcaatatctacagggttaccaaaaagctaattgagaactgtggccagtggtagacatacataaagtagttagcaacctcggtgaccgtgttgtctttaacaagacaaccagtttgtgatattctagtcttgaaagaacatatagtcatgtatgccggaatatgagtaaaaacacggaaacgcgatataaaggcccaagaacagccctttcagccctgagcattatacgcgcaataatcgaaattattcgcacgattacctgcccacgtcgggaaagcaaccgagttgccagaaccaccgaaaaccgcaaatgtagccaggaacaccatgacttgggtgccaccgtccagcgcagcagacaggaggtaattccacttcacaaaccactgcggtcggtaacggcgcagatagaactgaccgaacgcgccgaggatgtagtagctagtgagagaagcgttcagaccaacgaagagttctccaaggtaccacaggataatggccgagttgaggtatgaccagattcgctggtgcgggaagagacggtgcatgatgtagaagggcaatggggcgatgaagccgactaggaaagctgctgtgacccattcgtagcgcgcgccgatggagaacatcttgggtgcgatggaccatgcaatggcaagagtgttgaactgctggatttgggcgccggaccagatgtttgttccttcggcggtttcgaggatggttgcttggttttggacgatgctggagaggagttagactggatgggaatcttataccggggtaggtaagggatgggacttacgttatcatcatcacatagttgagaagggcgcccatgacacagccgatgacttgtgtgacgaacgtcgctttcggtgacagtttgttctgttgggcgagtttcagatcacggagaagcagccacccttgcgagagaccgttgtaggtgtatgtggtgaagtacatattagctggagagttgtcagtggaatgatctcaaaagcagtcaaagtagtggagtgtatacctaaaggacgtccgggcatcatgtaaccagcaatcatttggaaaatcggctgcaagttgtatccgaagcccgtaatggcatactgcgccccgaagaagaccataaaggtgacgaggaagatggtcgcgacaataaagccccaccacggaagggtggacttcatcacatataagca
